(19) United States
(12) Patent Application Publication
(10) Pub. No.: US 2020/0263173 A1
(43) Pub. Date: Aug. 20, 2020

(54) COMPOSITIONS AND METHODS FOR TREATING TRANSPOSON ASSOCIATED DISEASES

(71) Applicant: THE CHILDREN'S MEDICAL CENTER CORPORATION, BOSTON, MA (US)

(72) Inventors: TIMOTHY YU, BOSTON, MA (US); EUNJUNG ALICE LEE, BOSTON, MA (US)

(73) Assignee: THE CHILDREN'S MEDICAL CENTER CORPORATION, BOSTON, MA (US)

(21) Appl. No.: 16/645,083

(22) PCT Filed: Sep. 12, 2018
(86) PCT No.: PCT/US18/50576

§ 371 Date: Mar. 6, 2020

Related U.S. Application Data
(60) Provisional application No. 62/558,036, filed on Sep. 13, 2017.
(60) Provisional application No. 62/593,649, filed on Dec. 1, 2017.
(60) Provisional application No. 62/682,031, filed on Jun. 7, 2018.

(51) Int. Cl. C12N 15/113; C12Q 1/68

(52) U.S. Cl. CPC C12N 15/113; C12Q 1/68; C12N 2310/33; C12N 2310/31; C12N 2310/321

(57) ABSTRACT

The present invention features antisense oligonucleotides (AONs) for the treatment of diseases and disorders associated with the deleterious effects of transposable element insertion (e.g., long interspersed nuclear element-i (LINE-1), Arthrobacter luteus element (Alu), short interspersed nuclear element variable number tandem repeat Arthrobacter luteus element (SINE-VNTR-Alu) or (SVA), or endogenous retrovirus (ERV). In one aspect, the invention provides one or more antisense oligonucleotides complementary to a transposable element present in an intronic sequence within a gene. In another aspect, the invention provides a method for treating a subject having a genetic disorder associated with the insertion of a transposable element, the method involving administering to the subject one or more antisense oligonucleotides of any aspect delineated herein.

### CROSS-REFERENCE TO RELATED APPLICATION

[0001] This application claims the benefit of and priority to the following U.S. Provisional Application Nos.: 62/558,036, filed Sep. 13, 2017; 62/593,649, filed Dec. 1, 2017; and 62/682,031, filed Jun. 7, 2018, the entire contents of each of which are incorporated herein by reference.

### BACKGROUND OF THE INVENTION

[0002] Almost half of mammalian genomes contain repeat DNA sequences known as transposable elements. Many transposable elements (TE) have the ability to mobilize and change locations in the genome. Yet, the role of transposons in human health and disease is not well defined. Barbara McClintock, who discovered transposable elements in corn, proposed two main functions tor transposable elements: (1) insertional mutagens and (2) “controlling elements” that regulate the expression of nearby genes. RNA transposons (herein called retrotransposons) move via a copy-and-paste mechanism using RNA as an intermediate. Retrotransposition-mediated events in mammals are known to produce somatic alterations in the brain, as well as cancer. Current methods for detecting and treating the deleterious effects of TE insertion are required.

### SUMMARY OF THE INVENTION

[0003] As described below, the present invention features antisense oligonucleotides (AONs) for the treatment of diseases and disorders associated with the deleterious effects of transposable element insertion (e.g., long interspersed nuclear element-1 (LINE-1), Arthrobacter luteus element (Alu), short interspersed nuclear element variable number tandem repeat Arthrobacter luteus element (SINE-VNTR-A/u) or (SVA), or endogenous retrovirus (ERV).

[0004] In one aspect, the invention provides one or more antisense oligonucleotides complementary to a transposable element present in an intronic sequence within a gene.

[0005] In another aspect, the invention provides a set of antisense oligonucleotides comprising 2 or more antisense oligonucleotides of any aspect delineated herein. In various embodiments, the the set comprises 2-50 antisense oligonucleotides. In particular embodiments, the set comprises 5, 10 or 15 antisense oligonucleotides.

[0006] In another aspect, the invention provides a pharmaceutical composition comprising an effective amount of an antisense oligonucleotides of any aspect delineated herein or a set of antisense oligonucleotides of any aspect delineated herein in a pharmaceutically acceptable excipient.

[0007] In another aspect, the invention provides a method for treating a subject having a genetic disorder associated with the insertion of a transposable element, the method involving administering to the subject one or more antisense oligonucleotides of any aspect delineated herein.

[0008] In another aspect, the invention provides an isolated cell that is heterozygous for a mutation associated with a genetic defect, comprising a genetic mutation and a second allele comprising a retrotransposon insertion. In other embodiments, oligonucleotide therapy is used to correct undesirable splicing in recessive (homozygous), homozygous (compound heterozygous), or dominant (heterozygous) disease. In other embodiments, the cell is a fibroblast.

[0009] In another aspect, the invention provides a method of identifying an agent that inhibits a splicing event caused by a retrotransposon insertion, the method involving contacting a cell according to any aspect delineated herein, and detecting a splice product that does not comprise a retransposon sequence or fragment thereof.

[0010] In various embodiment of any aspect delineated herein, the oligonucleotide comprises a modified backbone. In various embodiments, the modified backbone comprises a 2′methoxy ethyl modification or a 2′ O-methyl modification. In various embodiments the antisense oligonucleotide binds a splice acceptor site present in the LINE-1, Alu, SVA, or ERV. In various embodiments, the antisense oligonucleotide comprises or consists of a sequence listed in Table 1. In various embodiments, the antisense oligonucleotide comprises at least one modified sugar moiety, e.g., a 2′-O-methyl group or a 2′-O-methoxyethyl group. In various embodiments, the nucleobase oligomer comprises at least one modified nucleobase. In various embodiments, the oligonucleotide comprises DNA residues, RNA residues, modified DNA or RNA residues, or combinations of any of these.

[0011] In various embodiment of any aspect delineated herein, the subject or cell is heterozygous for a mutation associated with a genetic defect. In various embodiment of any aspect delineated herein, the subject or cell comprises a first allele comprising a genetic mutation and a second allele comprising a retrotransposon insertion. In various embodiment of any aspect delineated herein, the transposable element is a retrotransposon. In various embodiments, the retrotransposon is LINE-1, Alu, SVA, or ERV.

[0012] Compositions and articles defined by the invention were isolated or otherwise manufactured in connection with the examples provided below. Other features and advantages of the invention will be apparent from the detailed description, and from the claims.

### Definitions

[0013] Unless defined otherwise, all technical and scientific terms used herein have the meaning commonly understood by a person skilled in the art to which this invention belongs. The following references provide one of skill with a general definition of many of the terms used in this invention: Singleton et al., Dictionary of Microbiology and Molecular Biology (2nd ed. 1994); The Cambridge Dictionary of Science and Technology (Walker ed., 1988); The Glossary of Genetics, 5th Ed., R. Rieger et al. (eds.), Springer Verlag (1991); and Hale & Marham, The Harper Collins Dictionary of Biology (1991). As used herein, the following terms have the meanings ascribed to them below, unless specified otherwise.

[0014] By a “nucleobase oligomer” is meant a compound that includes a chain of at least eight nucleobases joined together by linkage groups. Included in this definition are natural and non-natural oligonucleotides, both modified and unmodified, as well as oligonucleotide mimetics such as Protein Nucleic Acids, locked nucleic acids, and arabinonucleic acids. Numerous nucleobases and linkage groups may be employed in the nucleobase oligomers of the invention, including those described in detail herein in the section entitled “Oligonucleotides and other nucleobase oligomers,” infra

[0015] “Hybridization” means hydrogen bonding, which may be Watson-Crick, Hoogsteen or reversed Hoogsteen hydrogen bonding, between complementary nucleobases. For example, adenine and thymine are complementary nucleobases that pair through the formation of hydrogen bonds.

[0016] By “promoter” is meant a polynucleotide sufficient to direct transcription.

[0017] By “operably linked” is meant that a first polynucleotide is positioned adjacent to a second polynucleotide that directs transcription of the first polynucleotide when appropriate molecules (e.g., transcriptional activator proteins) are bound to the second polynucleotide.

[0018] Transposable elements are known in the art. The following exemplary sequences are provided for SVA transposons.

[0019] An “SVA transposon” comprises the Sequence of any of SVA1-6 or has at least about 85% identity to such sequence.

SVA1
CTCTCCCTCTCCCTCTCCCTCTCCCTCTCCCTCTCCCTCTCCCTCTCCCCT
CTTTCTACGGTCTCCCTCTGTTGCCGAGGCTGGACTGTACTGCCGTGATCT
CGGCTCGCTGCAACCTCCCTGCCTCGGGCTCCAGTGATTCTCCTGCCTCGG
CCTGCCGAGTGCCTGGGATTGCAGGCACGCGCCGCCACGCCTGACTGGTTT
TTGTATTTTTGGTGGAGACGGGGTTTCGCTGTGTTGACCGGGCTGGTCTCC
AGCTCCTGGCCTCGAGTGATCTGCCCGCCTCGGCCTCCCGAGGTGCTGGGA
TTGCAGACGGAGTCTCGCTCACTCAGTGCTCAATGTTGCCCAGGCTGGAGT
GCAGTGGCGTGATCTCGGCTCGCTACAACCTCCACCTCCCAGCCGCCTGCC
TTGGCCTCCCAAAGTGCTAAGATTGCAGCCTCTGCCCGGCCGCCACCCCGT
CTGGGAAGTGAGGAGCGTCTCTGCCTGGCCGCCCATCGTCTGGGATGTGAG
GAGCCCCTCTGCCCGGCCGCCCCGTCTGGGAAGTGAGGAGCGCCTCTGCCC
GGCCGCCACCCCGTCTGGGAAGTGAGGAGCGTCTCTGCCCGGCCGCCCATC
GTCTGGGATGTGAGGAGCGCCTCTGCCCGGCCGCCCCGTCTGGGATGTGAG
GAGCGCCTCTGCCCGGCCAGCCGCCCCGTCTGGGAGGTGGGGGGGTCAGCC
CCCCGCCCGGCCAGCCGCCCCGTCTGGGAGGAGGTGGGGGGGTCAGCCCCC
CGCCCGGCCAGCCGCCCCGTCTGGGAGGTGAGGGGCGCCTCTGCCCGGCCG
CCCCTTCTGGGAAGTGAGGAGCCCCTCTGCCCGGCCACCGCCCCGTCTGGG
AGGTGTACCCAGCGACCATTGAGAACGGGCCATGATGACGATGGCGGTTTT
GTCGAAAAGAAAAGGGGGAAATGTGGGGAAAAGAAAGAGAGATCAGATTGT
TACTGTGTCTGTGTAGAAAGAAGTAGACATAGGAGACTCCATTTTGTTCTG
TACTAAGAAAAATTCTTCTGCCTTGGGATGCTGTTAATCTATAACCTTACC
CCCAACCCCGTGCTCTCTGAAACATGTGCTGTGTCAACTCAGGGTTAAATG
GATTAAGGGCGGTGCAAGATGTGCTTTGTTAAACAGATGCTTGAAGGCAGC
ATGCTCGTTAAGAGTCATCACCACTCCCTAATCTCAAGTACCCAGGGACAC
AAACACTGCGGAAGGCCGCAGGGACCTCTGCCTAGGAAAACCAGAGACCTT
TGTTCACGTGTTTATCTGCTGACCTTCTCTCCACTATTATCCTATGACCCT
GCCACATCCCCCTCTCCGAGAAACACCCAAGAATGATCAATAAATACTAAA
AAAAAAAAAA
SVA2
CTCTCCCTCTCCCTCTCCCTCTCCCTCTCCCTCTCCCTCTCCCTGTCCCCT
CTTTCCACGGTCTCCCTCTGATGCCGAGCCGAGGCTGGACTGTACTGCCGC
CATCTCGGCTCACTGCAACCTCCCTGCCTGATTCTCCTGCCTCAGCCTGCC
GAGTGCCTGGGATTGCAGGCGCGCGCCGCCACGCCTGACTGGTTTTTGTAT
TTTTTGGTGGAGACGGGGTTTCGCCGTGTTGGCCGGGCTGGTCTCCAGCTC
CTGACCGCGAGTGATCTGCCCGCCTCGGCCTCCCGAGGTGCCGGGATTGCA
GACGGAGTCTCGCTCACTCAGTGCTCAATGTTGCCCAGGCTGGAGTGCAGT
GGCGTGATCTCGGCTCGCTACAACCTCCACCTCCCAGCCGCCTGCCTTGGC
CTCCCAAAGTGCCGAGATTGCAGCCTCTGCCCGGCCGCCACCCCGTCTGGG
AAGTGAGGAGCGTCTCTGCCTGGCCGCCCATCGTCTGGGATGTGAGGAGCC
CCTCTGCCCGGCCGCCCAGTCTGGGAAGTGAGGAGCGCCTCTTCCCGGCCG
CCATCCCGTCTGGGAAGTGAGGAGCGTCTCTGCCCGGCCGCCCATCGTCTG
GGATGTGGGGAGCGCCTCTGCCCCGCCGCCCCGTCTGGGATGTGAGGAGCG
CCTCTGCCCGGCCAGCCGCCCCGTCTGGGAGGTGGGGGGGTCAGCCCCCCG
CCCGGCCAGCCGCCCCGTCCGGGAGGAGGTGGGGGGGTCAGCCCCCCGCCC
GGCCAGCCGCCCCGTCTGGGAGGTGGGGGGCGCCTCTGCCCGGCCGCCCCG
TCTGGGAAGTGAGGAGCCCCTCTGCCCGGCCGCCACCCCGTCTGGGAGGTG
TACCCAACAGCTCATTGAGAACGGGCCATGATGACGATGGCGGTTTTGTCG
AATAGAAAAGGGGGAAATGTGGGGAAAAGAAAGAGAGATCAGATTGTTACT
GTGTCTGTGTAGAAAGAAGTAGACATAGGAGACTCCATTTTGTTCTGTACT
AAGAAAAATTCTTCTGCCTTGGGATGCTGTTAATCTATAACCTTACCCCCA
ACCCCGTGCTCTCTGAAACATGTGCTGTGTCCACTCAGGGTTAAATGGATT
AAGGGCGGTGCAAGATGTGCTTTGTTAAACAGATGCTTGAAGGCAGCATGC
TCGTTAAGAGTCATCACCACTCCCTAATCTCAAGTACCCAGGGACACAAAC
ACTGCGGAAGGCCGCAGGGTCCTCTGCCTAGGAAAACCAGAGACCTTTGTT
CACATGTTTATCTGCTGACCTTCCCTCCACTATTGTCCTATGACCCTGCCA
AATCCCCCTCTCCGAGAAACACCCAAGAATGATCAATAAATACTAAAAAAA
AAAAAA
SVA3
CTCTCCCTCTCCCTCTCCCTCTCCCTCTCCCTCTCCCTCTCCCTCTCCCCT
CTTTCCACGGTCTCCCTCTGATGCCGAGCCGAAGCTGGACTGTACTGCTGC
CATCTCGGCTCACTGCAACCTCCCTGCCTGATTCTCCTGCCTCAGCCTGCC
GAGTGCCTGCGATTGCAGGCGCGCGCCGCCACGCCTGACTGGTTTTCGTAT
TTTTTTGGTGGAGACGGGGTTTCGCTGTGTTGGCCGGGCTGGTCTCCAGCT
CCTAACCGCGAGTGATCCGCCAGCCTCGGCCTCCCGAGGTGCCGGGATTGC
AGACGGAGTCTCGTTCACTCAGTGCTCAATGTTGCCCAGGCTGGAGTGCAG
TGGCGTGATCTCGGCTCGCTACAACCTCCACCTCCCAGCCGCCTGCCTTGG
CCTCCCAAAGTGCCGAGATTGCAGCCTCTGCCCGGCCGCCACCCCGTCTGG
GAAGTGAGGAGCGTCTCTGCCTGGCCGCCCATCGTCTGGGATGTGAGGAGC
CCCTCTGCCTGGCTGCCCAGTCTGGGAAGTGAGGAGCGCCTCTTCCCGGCC
GCCATCCCGTCTAGGAAGTGAGGAGCGTCTCTGCCCGGCCGCCCATCGTCT
GAGATGTGGGGAGCGCCTCTGCCCCGCCGCCCCGTCTGGGATGTGAGGAGC
GCCTCTGCCCGGCCAGCCGCCCCGTCTGGGAGGTGGGGGGGTCAGCCCCCC
GCCCGGCCAGCCGCCCCGTCCGGGAGGAGGTGGGGGGGTCAGCCCCCCGCC
CGGCCAGCCGCCCCGTCCGGGAGGTGGGGGGCGCCTCTGCCCGGCCGCCCC
TTCTGGGAAGTGAGGAGCCCCTCTGCCCGGCCACCACCCCGTCTGGGAGGT
GTACCCAACAGCTCATTGAGAACGGGCCATGATGACGATGGCGGTTTTGTG
GAATAGAAAGGGGGGAAAGGTGGGGAAAAGATAGAGAAATCGGATTGTTGC
TGTGTCTGTGTAGAAAGAAGTAGACATGGGAGACTTCATTTTGTTCTGTAC
TAAGAAAAATTCTTCTGCCTTGGGATGCTGTTGATCTGTGACCTTACCCCC
AACCCTGTGCTCTCTGAAACATGTGCTGTGTCCACTCAGGGTTAAATGGAT
TAAGGGCGGTGCAAGATGTGCTTTGTTAAACAGATGCTTGAAGGCAGCATG
CTCGTTAAGAGTCATCACCACTCCCTAATCTCAAGTACCCAGGGACACAAA
CACTGCGGAAGGCCGCAGGGTCCTCTGCCTAGGAAAACCAGAGACCTTTGT
TCACTTGTTTATCTGCTGACCTTCCCTCCACTATTGTCCTATGACCCTGCC
AAATCCCCCTCTGCGAGAAACACCCAAGAATGATCAATAAAAAAAAAAAAA
AAAAAAA
SVA4
CTCTCCCTCTCCCTCTCCCTCTCCCTCTCCCTCTCCCTCTCCCTCTCCCCT
CTTTCCACGGTCTCCCTCTGATGCCGAGCCGAAGCTGGACTGTACTGCTGC
CATCTCGGCTCACTGCAACCTCCCTGCCTGATTCTCCTGCCTCAGCCTGCC
GAGTGCCTGCGATTGCAGGCGCGCGCCGCCACGCCTGACTGGTTTTCGTAT
TTTTTTGGTGGAGACGGGGTTTCGCTGTGTTGGCCGGGCTGGTCTCCAGCT
CCTAACCGCGAGTGATCCGCCAGCCTCGGCCTCCCGAGGTGCCGGGATTGC
AGACGGAGTCTGGTTCACTCAGTGCTCAATGGTGCCCAGGCTGGAGTGCAG
TGGCGTGATCTCGGCTCGCTACAACCTCCACCTCCCAGCCGCCTGCCTTGG
CCTCCCAAAGTGCCGAGATTGCAGCCTCTGCCCGGCCGCCACCCCGTCTGG
GAAGTGAGGAGCGTCTCTGCCTGGCCGCCCATCGTCTGGGATGTGAGGAGC
CCCTCTGCCTGGCTGCCCAGTCTGGGAAGTGAGGAGCGTCTCTGCCCGGCC
GCCATCCCATCTAGGAAGTGAGGAGCGTCTCTGCCCGGCCGCCCATCGTCT
GAGATGTGGGGAGCGCCTCTGCCCCGCCGCCCCGTCTGGGATGTGAGGAGC
GCCTCTGCCCGGCCAGCCGCCCCGTCTGGGAGGTGGGGGGGTCAGCCCCCC
GCCCGGCCAGCCGCCCCGTCCGGGAGGAGGTGGGGGGGTCAGCCCCCCGCC
CGGCCAGCCGCCCCGTCCGGGAGGTGAGGGGCGCCTCTGCCCGGCCGCCCC
TACTGGGAAGTGAGGAGCCCCTCTGCCCGGCCACCACCCCGTCTGGGAGGT
GTACCCAACAGCTCATTGAGAACGGGCCATGATGACAATGGCGGTTTTGTG
GAATAGAAAGGGGGGAAAGGTGGGGAAAAGATTGAGAAATCGGATGGTTGC
CGTGTCTGTGTAGAAAGAGGTAGACATGGGAGACTTTTCATTTTGTTCTGT
ACTAAGAAAAATTCTTCTGCCTTGGGATCCTGTTGATCTGTGACCTTACCC
CCAACCCTGTGCTCTCTGAAACATGTGCTGTGTCCACTCAGGGTTAAATGG
ATTAAGGGCGGTGCAAGATGTGCTTTGTTAAACAGATGCTTGAAGGCAGCA
TGCTCGTTAAGAGTCATCACCACTCCCTAATCTCAAGTACCCAGGGACACA
AACACTGCGGAAGGCCGCAGGGTCCTCTGCCTAGGAAAACCAGAGACCTTT
GTTCACTTGTTTATCTGCTGACCTTCCCTCCACTATTGTCCTATGACCCTG
CCAAATCCCCCTCTGCGAGAAACACCCAAGAATGATCAATAAAAAAAAAAA
AAAAAAAAA
SVA5
CTCTCCCTCTCCCTCTCCCTCTCCCTCTCCCTCTCCCTCTCCCTCTCCCCT
CTCTCCACGGTCTCCCTCTGATGCCGAGCCAAAGCTGGACGGTACTGCTGC
CATCTCGGCTCACTGCAACCTCCCTGCCTGATTCTCCTGCCTCAGCCTGCC
GAGTGCCTGCGATTGCAGGCGCGCGCCGCCACGCCTGACTGGTTTTCGTTT
TTTTTTGGTGGAGACGGGGTTTCGCTGTGTTGGCCGGGCTGGTCTCCAGCT
CCTAACCGCGAGTGATCCGCCAGCCTCGGCCTCCCGAGGTGCCGGGATTGC
AGACGGAGTCTCGTTCACTCAGTGCTCAATGGTGCCCAGGCTGGAGTGCAG
TGGCGTGATCTCGGCTCGCTACAACCACCTCCCAGCCGCCTGCCTTGGCCT
CCCAAAGAGCCGGATTGCAGCCTCTGCCCGGCCGCCACCCCGTCTGGGAAG
TGAGGAGCGTCTCTGCCTGGCCGCCCATCGTCTGGGATGTGAGGAGCCCCT
CTGCCTGGCCGCCCAGTCTGGGAAGTGAGGAGCGCCTCTGCCCGGCCGCCA
TCCCGTCTGGGAAGTGAGGAGCGTCTCTGCCCGGCCGCCCATCGTCTGGGA
TGTGGGGAGCACCTCTGCCCCGCCGCCCCGTCTGGGATGTGAGGAGCGCCT
CTGCCCGGCCAGCCGCCCCGTCCGGGAGGTGGGGGGGTCAGCCCCCCGCCC
GGCCAGCCGCCCCGTCCGGGAGGAGGTGGGGGGGTCAGCCCCCCGCCCGGC
CAGCCGCCCCGTCCGGGAGGTGAGGGGCGCCTCTGCCCGGCCGCCCCTACT
GGGAAGTGAGGAGCCCCTCTGCCCGGCCACCGCCCCGTCTGGGAGGTGTGC
CCAGCGGCTCATTGGGGATGGGCCATGATGACAATGGCGGTTTTGTGGAAT
AGAAAGGCGGGAAGGGTGGGGAAAAAATTGAGAAATCGGATGGTTGCCGGG
TCTGTGTGGATAGAAGTAGACATGGGAGACTTTTCATTTTGTTCTGTACTA
AGAAAAATTCTTCTGCCTTGGGATCCTGTTGATCTGTGACCTTATCCCCAA
CCCTGTGCTCTCTGAAACATGTGCTGTGTCCACTCAGGGTTAAATGGATTA
AGGGCGGTGCAAGATGTGCTTTGTTAAACAGATGCTTGAAGGCAGCATGCT
CGTTAAGAGTCATCACCACTCCCTAATCTTAAGTACCCAGGGACACAAACA
CTGCGGAAGGCCGCAGGGTCCTCTGCCTAGGAAAACCAGAGACCTTTGTTC
ACTTGTTTATCTGCTGACCTTCCCTCCACTATTGTCCTATGACCCTGCCAA
ATCCCCCTCTGCGAGAAACACCCAAGAATGATCAATAAAAAAAAAAAAAAA
AAAAA
SVA6
CTCTCCCTCTCCCTCTCCCTCTCCCTCTCCCTCTCCCTCTCCCTCTCCCCT
CTTTCCACGGTCTCCCTCTCATGCGGAGCCGAAGCTGGACTGTACTGCTGC
CATCTCGGCTCACTGCAACCTCCCTGCCTGATTCTCCTGCCTCAGCCTGCC
GAGTGCCTGCGATTGCAGGCACGCGCCGCCACGCCTGACTGGTTTTGGTGG
AGACGGGGTTTCGCTGTGTTGGCCGGGCCGGTCTCCAGCCCCTAACCGCGA
GTGATCCGCCAGCCTCGGCCTCCCGAGGTGCCGGGATTGCAGACGGAGTCT
CGTTCACTCAGTGCTCAATGGTGCCCAGGCTGGAGTGCAGTGGCGTGATCT
CGGCTCGCTACAACCTACACCTCCCAGCCGCCTGCCTTGGCCTCCCAAAGT
GCCGAGATTGCAGCCTCTGCCCGGCCGCCACCCCGTCTGGGAAGTGAGGAG
CGTCTCTGCCTGGCCGCCCATCGTCTGGGATGTGAGGAGCCCCTCTGCCCG
GCCGCCCAGTCTGGGAAGTGAGGAGCGCCTCCGCCCGGCCGCCATCCCGTC
TGGGAAGTGAGGAGCGTCTCTGCCCGGCCGCCCATCGTCTGAGATGTGGGG
AGCGCCTCTGCCCCGCCGCCCCGTCTGGGATGTGAGGAGCGCCTCTGCCCG
GCCAGCCGCCCCGTCTGGGAGGTGGGGGGGTCAGCCCCCCGCCCGGCCAGC
CGCCCCGTCCGGGAGGAGGTGGGGGGGTCAGCCCCCCGCCCGGCCAGCCGC
CCCGTCCGGGAGGTGAGGGGCGCCTCTGCCCGGCCGCCCCTACTGGGAAGT
GAGGAGCCCCTCTGCCCGGCCACCACCCCGTCTGGGAGGTGTGCCCAACAG
CTCATTGAGAACGGGCCAGGATGACAATGGCGGCTTTGTGGAATAGAAAGG
CGGGAAAGGTGGGGAAAAGATTGAGAAATCGGATGGTTGCCGTGTCTGTGT
AGAAAGAAGTAGACATGGGAGACTTTTCATTTTGTTCTGTACTAAGAAAAA
TTCTTCTGCCTTGGGATCCTGTTGATCTGTGACCTTACCCCCAACCCTGTG
CTCTCTGAAACATGTGCTGTGTCCACTCAGGGTTAAATGGATTAAGGGCGG
TGCAAGATGTGCTTTGTTAAACAGATGCTTGAAGGCAGCATGCTCGTTAAG
AGTCATCACCACTCCCTAATCTCAAGTAATCAGGGACACAAACACTGCGGA
AGGCCGCAGGGTCCTCTGCCTAGGAAAACCAGAGACCTTTGTTCACTTGTT
TATCTGCTGACCTTCCCTCCACTATTGTCCCATGACCCTGCCAAATCCCCC
TCTGTGAGAAACACCCAAGAATTATCAATAAAAAAAATTAAAAAAAAAA

[0020] By “antisense oligonucleotide targeting SVA” is meant a nucleobase oligomer that is complementary to a target sequence. The antisense oligonucleotide may contain modified bases, a modified backbone, or any other modification described herein or known in the art. Table 1 provides a list of antisense oligonucleotide (also termed an “AON”) directed against an SVA. Such AONs are useful for targeting an SVA present in a human genome.

TABLE 1
Library of Antisense Oligonucleotides Targeting
SVA

| | | |
|---|---|---|
| GGGAGGTGGGGGGCG | GTGATCTGCCCGCCT | CACCCCGTCTGGGAG |
| CTGACCTTCCCTCCA | GCAAGATGTGCTTTG | AGATAGAGAAATCGG |
| GTCCTCTGCCTAGGA | GGCGTGATCTCGGCT | AGAGAAATCGGATTG |
| GGAAGTGAGGAGCCC | CCTGATTCTCCTGCC | TCCCTCCACTATTGT |
| TACTAAAAAAAAAAA | GCCAGGATGACAATG | AATTGAGAAATCGGA |
| GGGATGCTGTTAATC | ATTGCAGGCGCGCGC | CCCATGACCCTGCCA |
| CACGCGCCGCCACGC | TGCGGAGCCGAAGCT | TGCAAGATGTGCTTT |
| TCTCCAGCTCCTGAC | CAACCTCCCTGCCTG | TACCCAGCGACCATT |
| CGTCCGGGAGGTGGG | TGCTGGGATTGCAGA | GTTGCTGTGTCTGTG |
| CTGTGTTGGCCGGGC | CAACCTCCCTGCCTC | AGGGACCTCTGCCTA |
| TCTCTGCCTGGCCGC | ACAGCTCATTGAGAA | AGGTGCTGGGATTGC |
| GATTGCAGGCGCGCG | CGCCATCCCATCTAG | TCTGGGAGGTGGGGG |
| TGGGGAAAAGATAGA | TTCATTTTGTTCTGT | CTGGGAGGTGTGCCC |
| TGCCCAGGCTGGAGT | AGCCCCTCTGCCTGG | GTTCACATGTTTATC |
| ATGACAATGGCGGTT | TCTCCGAGAAACACC | CAAAGTGCCGAGATT |
| GGTTTTCGTTTTTTT | GGCCGCAGGGTCCTC | TCTGAGATGTGGGGA |
| GGCGCCTCTGCCCGG | CGCCCCTTCTGGGAA | TGGGATTGCAGGCAC |
| AACGGGCCAGGATGA | CTCCCCTCTTTCTAC | CTGCCGTGATCTCGG |
| GCGCCTCTGCCCGGC | CAATAAATACTAAAA | AATGGCGGTTTTGTG |
| TCCGGGAGGTGAGGG | ATGGCGGTTTTGTGG | TGACCCTGCCAAATC |
| CTAAAAAAAAAAAAA | ATTGCAGGCACGCGC | TGATCAATAAATACT |
| CCGTGTTGGCCGGGC | TCACGTGTTTATCTG | AGTGCCGAGATTGCA |
| AATAAAAAAAATTAA | AAGAGGTAGACATGG | AGGCCGCAGGGACCT |
| GCCAGCCTCGGCCTC | TTAAGTACCCAGGGA | CCTCTGCCTAGGAAA |
| GGCCACCACCCCGTC | CGGGCTCCAGTGATT | GCCCCTCTGCCCGGC |
| ATGATGACAATGGCG | GGGATGTGGGGAGCG | TCTGGGAGGTGAGGG |
| CTAATCTTAAGTACC | GGGATGTGGGGAGCA | TCATTTTGTTCTGTA |
| ATGCCGAGCCGAGGC | AGACTTCATTTTGTT | CGCCTCGGCCTCCCG |
| CTCGCTACAACCTCC | GTATTTTTTTGGTGG | TAAGGGCGGTGCAAG |
| TGATGCCGAGCCAAA | ATCGTCTGGGATGTG | CCAAGAATGATCAAT |
| CACGCCTGACTGGTT | GCGCCTCTTCCCGGC | GACCGGGCTGGTCTC |
| GGAAAAGATTGAGAA | ACAAACACTGCGGAA | GCTGTTAATCTATAA |
| CTGCCTTGGCCTCCC | CCCATCGTCTGAGAT | CTTCTGGGAAGTGAG |
| GCTGACCTTCTCTCC | GAGACTTCATTTTGT | AGAAAGGCGGGAAAG |
| GCCCAGGCTGGAGTG | TTAAGAGTCATCACC | AGTCTCGCTCACTCA |
| GTTTCGCTGTGTTGA | GGGCGCCTCTGCCCG | GTCTAGGAAGTGAGG |
| CTCCATTTTGTTCTG | CTCACTGCAACCTCC | TGGGATTGCAGACGG |
| GTTTCGCTGTGTTGG | ATCGTCTGAGATGTG | AGAGTCATCACCACT |
| CTCTCCACTATTATC | CCGGCCGCCCAGTCT | GATGCTGTTGATCTG |
| GTCTGTGTGGATAGA | TGAGATGTGGGGAGC | CCCCGCCGCCCCGTC |
| TTTCGTATTTTTTTG | GCTGCCATCTCGGCT | GGGCCATGATGACGA |
| CTTTGTTCACTTGTT | AGTGGCGTGATCTCG | AAGCTGGACTGTACT |
| ACAACCTACACCTCC | CGCCTGCCTTGGCCT | GCAGACGGAGTCTCG |
| GTGATTCTCCTGCCT | GCTGTGTCCACTCAG | TCTGCCCGGCCGCCA |
| GGTTAAATGGATTAA | CTCTTCCCGGCCGCC | TCTGCCCGGCCGCCC |
| CTGCCAAATCCCCCT | GCCGCCACGCCTGAC | GGATGTGAGGAGCCC |
| CCTAACCGCGAGTGA | TTTTTTTGGTGGAGA | GGGAAGTGAGGAGCG |
| CAACTCAGGGTTAAA | CTCCCTGTCCCCTCT | GGGAAGTGAGGAGCC |
| AAAGTGCCGAGATTG | TTACCCCCAACCCTG | TCCACCTCCCAGCCG |
| AGAATGATCAATAAA | TGTGGATAGAAGTAG | GTGGGGAAAAGATAG |
| TGACCTTATCCCCAA | CTACAACCACCTCCC | CTAAGATTGCAGCCT |
| TCTGCTGACCTTCTC | GTTTATCTGCTGACC | TGAAGGCAGCATGCT |
| AAAGGCGGGAAAGGT | GGGGATGGGCCATGA | GCTGGACTGTACTGC |
| GGTCTGTGTGGATAG | GACTTCATTTTGTTC | CACTGCGGAAGGCCG |
| ACGGTCTCCCTCTCA | TGGCGGTTTTGTGGA | GAGGAGCGCCTCTTC |
| GTGATCTCGGCTCGC | CCGCCCAGTCTGGGA | TCGAAAAGAAAAGGG |
| GTAGAAAGAGGTAGA | CTCCCAGCCGCCTGC | TTTGTTAAACAGATG |
| TCTGCCTGGCTGCCC | GCTCGCTACAACCAC | CTGACTGGTTTTGGT |
| CGATTGCAGGCGCGC | CACCCCGTCTGGGAA | TTGCAGGCACGCGCC |
| ATTGAGAAATCGGAT | GGGAGCGCCTCTGCC | TCTGTTGCCGAGGCT |
| CGCCTCTGCCCCGCC | GTGGAATAGAAAGGC | AGAGAGATCAGATTG |
| ACCCAGCGACCATTG | TCTCGGCTCACTGCA | CTCGGCCTCCCGAGG |
| AGCGTCTCTGCCCGG | GTGGAATAGAAAGGG | TGGCGTGATCTCGGC |
| CCTAATCTTAAGTAC | GGGAGGAGGTGGGGG | GCCTCCGCCCGGCCG |
| AAAGATTGAGAAATC | TTTGTATTTTTGGTG | TCTCCCTCTCCCTCT |
| CGAGTGATCCGCCAG | GGTGCCCAGGCTGGA | TCAGGGTTAAATGGA |
| CCATCTAGGAAGTGA | TATTTTTTTGGTGGA | CTGTGAGAAACACCC |
| GAAAGAGGTAGACAT | CCGCCTCGGCCTCCC | CCGAGTGCCTGCGAT |
| TTGGCCGGGCCGGTC | TGCCGGGTCTGTGTG | CCCTCCACTATTGTC |
| GGAGACGGGGTTTCG | GAATAGAAAGGGGGG | CCTCTCCCCTCTTTC |
| CCGCGAGTGATCCGC | TCAAGTACCCAGGGA | CAATGGCGGCTTTGT |
| TAGAAAGGGGGGAAA | GGTAGACATGGGAGA | CGCCTCTGCCCGGCC |
| GCCTCTTCCCGGCCG | ACATGTGCTGTGTCC | GAAACATGTGCTGTG |
| AAAGATAGAGAAATC | ACATGTGCTGTGTCA | CCCCCAACCCTGTGC |
| GCCGGTCTCCAGCCC | CGGAGTCTGGTTCAC | GAGTCTCGCTCACTC |
| CGGTTTTGTCGAAAA | CGTATTTTTTTGGTG | TGGTGGAGACGGGGT |
| CTTTGTTAAACAGAT | ACCCCCAACCCCGTG | GGTCTCCCTCTGTTG |
| CAGCTCCTAACCGCG | CCTGCCTGATTCTCC | AAACACTGCGGAAGG |
| TTCACTTGTTTATCT | CGTCTGGGAGGTGTG | GGCCGCCATCCCGTC |
| CTCGCTACAACCACC | CGTCTGGGAGGTGTA | CAGACGGAGTCTCGT |
| CCTCCCAGCCGCCTG | TCTGCGAGAAACACC | GCTCATTGGGGATGG |
| TCCCTAATCTCAAGT | TTGAGAACGGGCCAT | CATCACCACTCCCTA |
| CTGCCTGATTCTCCT | CCCCCTCTGCGAGAA | TCTCCCTCTCCCCTC |
| TGCCTGCGATTGCAG | CATTGGGGATGGGCC | CAGACGGAGTCTCGC |
| GCTCACTCAGTGCTC | GCGGGAAGGGTGGGG | AAGGGTGGGGAAAAA |
| TCTCGGCTCGCTACA | GTACCCAGGGACACA | TTCTGGGAAGTGAGG |
| GCCGCCATCTCGGCT | GCGCCTCTGCCCCGC | CCTGCCACATCCCCC |
| GCTCCTAACCGCGAG | TTTCGCCGTGTTGGC | CTGCCCAGTCTGGGA |
| TAGGAAAACCAGAGA | TGTACTGCCGTGATC | ACCTTACCCCCAACC |
| CTCGCTCACTCAGTG | ACCTCCCTGCCTCGG | CGCCATCCCGTCTGG |
| CCTCTTTCTACGGTC | ATTTTTTGGTGGAGA | CTCTGCCCGGCCGCC |
| TCGCTGCAACCTCCC | CTATGACCCTGCCAC | AGGAGGTGGGGGGGT |
| AGCACCTCTGCCCCG | CTTGTTTATCTGCTG | CTCCCGAGGTGCCGG |
| AAGTGAGGAGCGTCT | CTATGACCCTGCCAA | CGAAGCTGGACTGTA |
| AGGGGGAAATGTGGG | TAAAAAAAAAAAAAA | GTTGGCCGGGCTGGT |
| GCCTTGGGATCCTGT | CGCTACAACCTACAC | TAGAAAAGGGGGAAA |
| CATCTAGGAAGTGAG | GTCCACTCAGGGTTA | GGCTGGAGTGCAGTG |
| ATCTGTGACCTTATC | GCAGGGTCCTCTGCC | CCCTGCCTCGGGCTC |
| GGGGGGGTCAGCCCC | CCCCTCTTTCCACGG | GTCTGGGATGTGGGG |
| GTGTTTATCTGCTGA | GTCTGGGAGGTGAGG | CTGTGTCAACTCAGG |
| GGAAAACCAGAGACC | TGGGGATGGGCCATG | GCCGTGTTGGCCGGG |
| GCATGCTCGTTAAGA | GGTGTACCCAGCGAC | CACTATTATCCTATG |
| AAAAGATTGAGAAAT | GCTGACCTTCCCTCC | CCCCTCTCCGAGAAA |
| AAGTGAGGAGCGCCT | CCGCGAGTGATCTGC | CGGCTCGCTACAACC |
| ACCTTCTCTCCACTA | CGGCCGCCCCTTCTG | GTCTGGGATGTGAGG |
| AGACTTTTCATTTTG | GATTGAGAAATCGGA | GACATGGGAGACTTT |
| CTCGGCTCGCTACAA | AGTGCCTGGGATTGC | CCCCTCTTTCTACGG |
| CTCCAGCCCCTAACC | CTGAGATGTGGGGAG | GAAGGCCGCAGGGAC |
| AGGTAGACATGGGAG | AGAAGTAGACATGGG | AGGATGACAATGGCG |
| TCCCGAGGTGCTGGG | CGCCCATCGTCTGGG | GACATGGGAGACTTC |
| CCTCGAGTGATCTGC | TGCCCGGCCGCCCAG | CCACCACCCCGTCTG |
| GGTTCACTCAGTGCT | TCAATAAAAAAAAAA | GGGAGGTGTGCCCAA |
| CAGCCTCGGCCTCCC | GTCGAATAGAAAAGG | GCCCGCCTCGGCCTC |
| AAGGCCGCAGGGTCC | CTCCCTCTCCCCTCT | GGGAGGTGTGCCCAG |
| GTACTAAGAAAAATT | TGCCCGGCCGCCCAT | ATCTGTGACCTTACC |
| AAGATGTGCTTTGTT | TTGAGAACGGGCCAG | TATAACCTTACCCCC |
| AATCCCCCTCTGCGA | AGCTGGACGGTACTG | CATGCTCGTTAAGAG |
| TGACCCTGCCACATC | TGTATTTTTGGTGGA | GCGTCTCTGCCTGGC |
| GCCTCTGCCCCGCCG | AAGAATGATCAATAA | GGGTCTGTGTGGATA |
| TGGGATGTGAGGAGC | CTAATCTCAAGTAAT | CGTCCGGGAGGTGAG |
| TTCCACGGTCTCCCT | GATCCTGTTGATCTG | ACGGTCTCCCTCTGT |
| CTGCCTAGGAAAACC | TCGGCTCGCTGCAAC | ATGGTGCCCAGGCTG |
| GGCCGGTCTCCAGCC | CGCCATCTCGGCTCA | TGGGAGGTGTACCCA |
| CCTTATCCCCAACCC | AAGAAGTAGACATAG | TCTGCCCGGCCAGCC |
| CGGCTCACTGCAACC | CTCCAGCTCCTGGCC | CCCTGTCCCCTCTTT |
| TCTGCCTGGCCGCCC | AAAAGGGGGAAATGT | TGACCTTACCCCCAA |
| TCGTTTTTTTTTGGT | ACTGCGGAAGGCCGC | ACGGTCTCCCTCTGA |
| CAATGGCGGTTTTGT | CCGTGATCTCGGCTC | CCTTTGTTCACGTGT |
| CGAGAAACACCCAAG | TGTGTCCACTCAGGG | TGTACTGCTGCCATC |
| GTGTTGACCGGGCTG | CGTGTTTATCTGCTG | TGGGATTGCAGGCGC |
| AGACGGAGTCTCGCT | ATTTTTGGTGGAGAC | CCCCTCTGTGAGAAA |
| CCCTGCCAAATCCCC | AGACCTTTGTTCACA | TTTGGTGGAGACGGG |
| CTCCTGACCGCGAGT | AGACCTTTGTTCACG | AACCTCCCTGCCTCG |
| AGGGGGGAAAGGTGG | GGATTGCAGACGGAG | CCTGACTGGTTTTGG |
| CCCGGCCGCCCCTAC | CCCAACCCCGTGCTC | CCACGGTCTCCCTCT |
| TCAGTGCTCAATGTT | AGCTCCTGGCCTCGA | GCGGCTCATTGGGGA |
| GCCGAGGCTGGACTG | TAGAAAGAAGTAGAC | ACTTCATTTTGTTCT |
| TGGCCTCCCAAAGTG | CTCCAGTGATTCTCC | CCTCCCTGCCTCGGG |
| CTCGAGTGATCTGCC | CTGCCCGGCCACCGC | GGGATTGCAGGCACG |
| TCGTTCACTCAGTGC | ATCTCAAGTAATCAG | TGTCCTATGACCCTG |
| CTCCCCTCTCTCCAC | GATGGCGGTTTTGTC | GCCCAGTCTGGGAAG |
| CCAGCGACCATTGAG | GATGGCGGTTTTGTG | CGTCTGGGAGGTGGG |
| CCAGGATGACAATGG | AAGTACCCAGGGACA | TCTTAAGTACCCAGG |
| CTGCTGCCATCTCGG | TCCTGGCCTCGAGTG | AGAAAGAGGTAGACA |
| TCCCATCTAGGAAGT | CGTTAAGAGTCATCA | TGTTGACCGGGCTGG |
| CCATGATGACGATGG | ACAATGGCGGCTTTG | CAGCCGCCTGCCTTG |
| GCAGGGACCTCTGCC | GGATGCTGTTGATCT | ATAAATACTAAAAAA |
| CCCGGCCGCCCCGTC | GTGTAGAAAGAGGTA | CCAACCCCGTGCTCT |
| ATCTTAAGTACCCAG | AAGATTGAGAAATCG | GATCTGCCCGCCTCG |
| CAGCGACCATTGAGA | GTGCTGGGATTGCAG | TTGTTCACGTGTTTA |
| CCGAGTGCCTGGGAT | CTCCACTATTATCCT | TGCGGAAGGCCGCAG |
| AAAAGAAAGAGAGAT | GACCGCGAGTGATCT | GGCGGTTTTGTCGAA |
| AGGCGGGAAAGGTGG | GGCCATGATGACGAT | TCAGATTGTTACTGT |
| CTGTTGCCGAGGCTG | CCCCGCCCGGCCAGC | TGCCCGGCCAGCCGC |
| TGGGAGGAGGTGGGG | CGGTCTCCAGCCCCT | ACTGGTTTTGGTGGA |
| GTCTCCCTCTCATGC | CGTCCGGGAGGAGGT | TGCCTTGGCCTCCCA |
| CCTAATCTCAAGTAC | TACAACCTACACCTC | GAATGATCAATAAAA |
| CCAGTCTGGGAAGTG | GGGAGACTTCATTTT | CAGAGACCTTTGTTC |
| CCTAATCTCAAGTAA | CCGGGAGGTGGGGGG | GAAAGAGAGATCAGA |
| TCCGGGAGGAGGTGG | GGTTTTGTGGAATAG | GAATGATCAATAAAT |
| CGGGTCTGTGTGGAT | GTTTTTTTTTGGTGG | AATTATCAATAAAAA |
| CAACCTCCACCTCCC | CGGGCTGGTCTCCAG | CCGGGATTGCAGACG |
| GGCTTTGTGGAATAG | TCCACTATTGTCCTA | GGTTGCCGTGTCTGT |
| CTGGGATGTGGGGAG | ATTGAGAACGGGCCA | AGACGGAGTCTCGTT |
| CTGGTCTCCAGCTCC | CTTCTCTCCACTATT | TGCTTGAAGGCAGCA |
| TGGGAAGTGAGGAGC | GTGATCCGCCAGCCT | ATAGAAAAGGGGGAA |
| CCCTCTGTTGCCGAG | GCTGGACGGTACTGC | AAAGAGGTAGACATG |
| GTGACCTTACCCCCA | CCCGTCCGGGAGGAG | GTTCACTTGTTTATC |
| CCCAAAGTGCCGAGA | TCTGGGATGTGGGGA | GTGTGCCCAGCGGCT |
| GGATTGCAGCCTCTG | AGAGACCTTTGTTCA | TCGCCGTGTTGGCCG |
| GTGGGGAAAAGATTG | CCCTCTGCCCGGCCG | TCCTGCCTCGGCCTG |
| GTGCAGTGGCGTGAT | GACCTTTGTTCACTT | CGTTCACTCAGTGCT |
| TAAGAAAAATTCTTC | CCCTCTGCCCGGCCA | GGGTCAGCCCCCCGC |
| TCTGGGAAGTGAGGA | TGCCCCGCCGCCCCG | TTGTATTTTTTGGTG |
| AGTGCTCAATGGTGC | CCGGCCGCCCCGTCT | TGCCGAGTGCCTGGG |
| GTGCTTTGTTAAACA | GATTGTTACTGTGTC | TTGGGGATGGGCCAT |
| ATCCCATCTAGGAAG | TGGGATGTGGGGAGC | AAAAAATTAAAAAAA |
| CTGCCCCGCCGCCCC | ACCTCCACCTCCCAG | TTTTGTGGAATAGAA |
| GCCTCGGCCTGCCGA | TGGTTTTCGTTTTTT | GGGGGGTCAGCCCCC |
| CCTGCCAAATCCCCC | CCGGCCACCGCCCCG | CCTGCCTCGGCCTGC |
| CTCCCTAATCTCAAG | AATGATCAATAAAAA | ATGCCGAGCCAAAGC |
| CCCAAAGTGCTAAGA | ACCCCGTGCTCTCTG | CCTGACCGCGAGTGA |
| GCCCCGCCGCCCCGT | GAGTCTCGTTCACTC | CTATAACCTTACCCC |
| ATGGGAGACTTCATT | CACGTGTTTATCTGC | AATCCCCCTCTCCGA |
| GTGCCCAGGCTGGAG | CAGGCACGCGCCGCC | CCTCCCGAGGTGCCG |
| GCCCCGTCTGGGAAG | TAGACATGGGAGACT | CAAAGCTGGACGGTA |
| AGCGCCTCCGCCCGG | TTAATCTATAACCTT | GGGAGCACCTCTGCC |
| ATCCGCCAGCCTCGG | TCTCCACTATTATCC | CCACGCCTGACTGGT |
| CATGGGAGACTTTTC | GTGTACCCAACAGCT | TGGACTGTACTGCCG |
| GGGTTTCGCCGTGTT | CCAGCTCCTGGCCTC | TACAACCACCTCCCA |
| CCTACTGGGAAGTGA | CCGTCCGGGAGGTGG | GTTTTGTCGAAAAGA |
| ATGTGGGGAAAAGAA | CCGTCCGGGAGGTGA | TCTGTGTAGAAAGAG |
| ATGGGCCATGATGAC | CCATCTCGGCTCACT | ATAGAGAAATCGGAT |
| GCCGCCACCCCGTCT | CCCCCCGCCCGGCCA | TCTGTGTAGAAAGAA |
| GGCACGCGCCGCCAC | TTGTCCTATGACCCT | GAGCGCCTCTGCCCG |
| TGTGAGGAGCGCCTC | CGGTCTCCCTCTGAT | ACCTTTGTTCACTTG |
| ACCGCGAGTGATCCG | ATTCTCCTGCCTCGG | GAGCGCCTCTGCCCC |
| GCTGCAACCTCCCTG | GATCTGTGACCTTAC | ATCTCGGCTCGCTAC |
| CCCAAGAATTATCAA | TGCCCGGCCACCGCC | AAAGGCGGGAAGGGT |
| GCCAAATCCCCCTCT | ACTAAGAAAAATTCT | GATGTGGGGAGCACC |
| TTCGCTGTGTTGGCC | AAGTGCTAAGATTGC | GGGGTCAGCCCCCCG |
| CTGTGACCTTATCCC | GAGCGTCTCTGCCCG | TATGACCCTGCCACA |
| GCAACCTCCCTGCCT | GATCTGTGACCTTAT | GCCTCCCAAAGAGCC |
| CGAGGTGCTGGGATT | TGGTTCACTCAGTGC | AGCCTCTGCCCGGCC |
| CGCGAGTGATCCGCC | GACCCTGCCAAATCC | CCAGGGACACAAACA |
| GAAAAGAAAAGGGGG | GATTGCAGCCTCTGC | CCCGGCCGCCATCCC |
| ATTGTTGCTGTGTCT | GACCTCTGCCTAGGA | GAGGAGCGCCTCTGC |
| ACCGCCCCGTCTGGG | CATGATGACGATGGC | TCTCCCTGTCCCCTC |
| TGATCCGCCAGCCTC | GGGATTGCAGACGGA | CCCGTCTGGGATGTG |
| TGATTCTCCTGCCTC | CGGGAGGAGGTGGGG | TCAGCCCCCCGCCCG |
| CAGCTCCTGACCGCG | ACCCCGTCTGGGAGG | GGGGAAATGTGGGGA |
| GTGCTCAATGTTGCC | CTCCCTCTCCCTCTC | CCCCTCTGCCCGGCC |
| GAGGAGGTGGGGGGG | CTCTCCACGGTCTCC | ATCTGCTGACCTTCC |
| GCTCCTGACCGCGAG | GGAGTCTCGCTCACT | GGGGAAAGGTGGGGA |
| TGCTCAATGTTGCCC | GGCCTCGAGTGATCT | TGCTCAATGGTGCCC |
| GTGCCCAGCGGCTCA | CCTCTGCCTGGCTGC | TACCCCCAACCCTGT |
| CCTCCCTGCCTGATT | TGCCCGGCCGCCCCT | ATCTGCTGACCTTCT |
| GCCGAGTGCCTGCGA | ATGCCGAGCCGAAGC | TTTGTCGAAAAGAAA |
| TCTGTGACCTTACCC | AAATCCCCCTCTGTG | TTCTACGGTCTCCCT |
| ACCTCCCAGCCGCCT | CCTTTGTTCACTTGT | AGATGCTTGAAGGCA |
| AAAATTCTTCTGCCT | TTGTTTATCTGCTGA | CTGGCTGCCCAGTCT |
| AGTCTGGTTCACTCA | ACTGTACTGCCGCCA | CCTCCCAAAGTGCCG |
| TTTGTATTTTTTGGT | AAAAAAAAAAAAAAA | CTCTGAAACATGTGC |
| ATTGTCCTATGACCC | GCCGCCATCCCATCT | CCAAAGTGCTAAGAT |
| AATCTCAAGTACCCA | TGCCCGGCCGCCCCG | CGGGAGGTGGGGGGC |
| TTGCTGTGTCTGTGT | GACCTTTGTTCACGT | ACGGGGTTTCGCCGT |
| CCGCCTGCCTTGGCC | GCCACATCCCCCTCT | GCTCACTGCAACCTC |
| CCGAGGTGCCGGGAT | GTTTTCGTTTTTTTT | GATGCCGAGCCAAAG |
| AAGAGAGATCAGATT | GTCTCTGCCCGGCCG | GTTGCCGTGTCTGTG |
| GCCCGGCCACCACCC | TGGTCTCCAGCTCCT | CCTAGGAAAACCAGA |
| GGGTGGGGAAAAAAT | CAGACGGAGTCTGGT | TGGCGGTTTTGTCGA |
| TCCACGGTCTCCCTC | CCAAAGAGCCGGATT | TCTCCCCTCTCTCCA |
| GTCTCCAGCCCCTAA | TGGCTGCCCAGTCTG | CGCGAGTGATCTGCC |
| GCCTGGGATTGCAGG | GAGATCAGATTGTTA | TGTGCTGTGTCAACT |
| CGGGAGGTGAGGGGC | GGGAAATGTGGGGAA | TGTTCACATGTTTAT |
| CCTCCCAAAGAGCCG | CCTCCCAAAGTGCTA | TCTCCCTCTCATGCG |
| TGGACGGTACTGCTG | CCATCGTCTGAGATG | GAGGAGCGCCTCCGC |
| CCCCCTCTGTGAGAA | GGCCGCCCATCGTCT | GGGAGGTGGGGGGGT |
| GAGGTGCTGGGATTG | GGAGTGCAGTGGCGT | GTGTGGATAGAAGTA |
| GAGTCATCACCACTC | CCCTAACCGCGAGTG | AATAGAAAAGGGGGA |
| AAACCAGAGACCTTT | GGTTTTGTCGAAAAG | AAGGCAGCATGCTCG |
| CGGGATTGCAGACGG | TAATCTATAACCTTA | ACCCTGCCACATCCC |
| CCGAAGCTGGACTGT | TACACCTCCCAGCCG | AAGAATTATCAATAA |
| TGACTGGTTTTTGTA | TTGCAGCCTCTGCCC | CCACCTCCCAGCCGC |
| TTTTTTGGTGGAGAC | AGATTGAGAAATCGG | TTGTTCACATGTTTA |
| GGATGGTTGCCGGGT | ATTGTTACTGTGTCT | AGCCCCTCTGCCCGG |
| CGGCCGCCATCCCGT | TTTGTTCACTTGTTT | ACTCCATTTTGTTCT |
| GGAAGTGAGGAGCGC | CTCGCTACAACCTAC | GTTCACTCAGTGCTC |
| CGAGTGCCTGGGATT | ACTGGTTTTCGTTTT | GTCCCCTCTTTCCAC |
| TGGCCGCCCATCGTC | CTGCCCGGCCACCAC | AAGGGGGAAATGTGG |
| GAGATGTGGGGAGCG | GCTCCAGTGATTCTC | CCGGGCTGGTCTCCA |
| CCTCTTCCCGGCCGC | CTAAGAAAAATTCTT | CGCCGCCACGCCTGA |
| GCGTGATCTCGGCTC | CCCCCTCTCCGAGAA | CGTCTGGGAGGTGAG |
| GTGCTCAATGGTGCC | CCTCTCTCCACGGTC | TGGTTTTTGTATTTT |
| TGGAATAGAAAGGCG | AATAGAAAGGGGGGA | AGTGCAGTGGCGTGA |
| AAAGTGCTAAGATTG | TCTTTCCACGGTCTC | GAGAAACACCCAAGA |
| TTCCCTCCACTATTG | CGTGTCTGTGTAGAA | ACTGGTTTTCGTATT |
| CCTTGGGATCCTGTT | TCCAGCTCCTAACCG | AAGATAGAGAAATCG |
| CGGGGTTTCGCCGTG | TCCTAACCGCGAGTG | CCTGCGATTGCAGGC |
| CCAAGAATTATCAAT | TGACCTTCCCTCCAC | AAGTGCCGAGATTGC |
| CCCAACAGCTCATTG | CAGGGACCTCTGCCT | TGCTGACCTTCCCTC |
| TTTATCTGCTGACCT | TGTTAAACAGATGCT | ATTTTGTTCTGTACT |
| TGCTGTTAATCTATA | CCGTCTGGGAGGTGA | ATGATCAATAAATAC |
| GTGGGGAAAAAATTG | AATGATCAATAAATA | CTGCCGCCATCTCGG |
| AGGGGCGCCTCTGCC | CGCCAGCCTCGGCCT | GTCTGGGAGGTGTAC |
| ATAAAAAAAATTAAA | TGGTGCCCAGGCTGG | AGGTGTACCCAGCGA |
| CGGGCCAGGATGACA | TGCCTGGCCGCCCAT | TTTTGGTGGAGACGG |
| GAGCCCCTCTGCCCG | AGGAAAACCAGAGAC | TTTTTGTATTTTTGG |
| TCTCCTGCCTCAGCC | CTCGGCTCGCTGCAA | AATCGGATTGTTGCT |
| GCCGCAGGGACCTCT | GAGGTGTGCCCAACA | TTGCCGTGTCTGTGT |
| GTAGACATGGGAGAC | ACGCGCCGCCACGCC | TCTGCCCCGCCGCCC |
| CTCCAGCTCCTGACC | CCGTCTGGGAGGTGT | TCCCAAAGAGCCGGA |
| TGGGATCCTGTTGAT | CTCCTGGCCTCGAGT | CCTACACCTCCCAGC |
| GGATGGTTGCCGTGT | GAGTCTGGTTCACTC | ACGATGGCGGTTTTG |
| CTGGTTTTTGTATTT | CGTCTCTGCCCGGCC | CCCGCCTCGGCCTCC |
| AGTGAGGAGCGTCTC | TTCTCCTGCCTCAGC | GGATGTGAGGAGCGC |
| GTCTGGGAGGTGGGG | CCCTGTGCTCTCTGA | CCGGGCCGGTCTCCA |
| AACCCCGTGCTCTCT | CCTCCCGAGGTGCTG | GGCTGCCCAGTCTGG |
| CGTCTGGGAAGTGAG | GTCCCATGACCCTGC | CTGTGTCCACTCAGG |
| TGCCTCAGCCTGCCG | AGAAAGAGAGATCAG | AGTCATCACCACTCC |
| CTTATCCCCAACCCT | CGAGCCGAGGCTGGA | CTGGTTTTGGTGGAG |
| AGGAGCGTCTCTGCC | ATAGAAAGGCGGGAA | GGTGTGCCCAGCGGC |
| TATTGTCCTATGACC | AGCCGCCCCGTCCGG | CGAGCCGAAGCTGGA |
| TCCCCAACCCTGTGC | CGGATTGCAGCCTCT | GGGCTCCAGTGATTC |
| GACTCCATTTTGTTC | TTATCCCCAACCCTG | TCCACTATTATCCTA |
| CACTATTGTCCTATG | AATCTATAACCTTAC | GAAGCTGGACTGTAC |
| GAAGTGAGGAGCGCC | CTACAACCTCCACCT | GGCCGCCCAGTCTGG |
| CGCAGGGACCTCTGC | GTGGGGAGCACCTCT | TGGAGACGGGGTTTC |
| CTTGAAGGCAGCATG | AAATCCCCCTCTGCG | TCACTTGTTTATCTG |
| TTGGTGGAGACGGGG | TGCAGGCGCGCGCCG | CCCTGCCACATCCCC |
| CCCAAAGAGCCGGAT | GATCTCGGCTCGCTG | TCTCCTGCCTCGGCC |
| GCCTGATTCTCCTGC | CAGCCTGCCGAGTGC | TAGGAGACTCCATTT |
| TTTTCATTTTGTTCT | AGATTGCAGCCTCTG | GACGGAGTCTGGTTC |
| GTTACTGTGTCTGTG | TGCCCAGCGGCTCAT | TTGGCCGGGCTGGTC |
| TGACCGCGAGTGATC | AGGTGAGGGGCGCCT | GAAAACCAGAGACCT |
| CTCGTTCACTCAGTG | GATCTCGGCTCGCTA | GATGTGAGGAGCCCC |
| CCGCCATCCCGTCTG | TGCCCGCCTCGGCCT | TAGAAGTAGACATGG |
| TCTCCAGCCCCTAAC | GGGCGGTGCAAGATG | CCCTCTCCCTGTCCC |
| CTCTCCGAGAAACAC | CCCGTCTAGGAAGTG | TGGGATGCTGTTAAT |
| GGATAGAAGTAGACA | AGACATAGGAGACTC | CCCGAGGTGCCGGGA |
| CGGATTGTTGCTGTG | TAATCTTAAGTACCC | CATCCCGTCTGGGAA |
| TGTGCTGTGTCCACT | ACCTCCCTGCCTGAT | TCAATGGTGCCCAGG |
| AGGTGGGGAAAAGAT | TCCGCCAGCCTCGGC | CCGGCCGCCCCTTCT |
| CATGTGCTGTGTCAA | TCCCGTCTGGGAAGT | GACAATGGCGGTTTT |
| TCCACTCAGGGTTAA | GAGGTGCCGGGATTG | ACCATTGAGAACGGG |
| GTGGCGTGATCTCGG | CCTCTGCGAGAAACA | AAAAGAAAAGGGGGA |
| CCCAGCCGCCTGCCT | TGGTTTTCGTATTTT | CAACAGCTCATTGAG |
| TGACCGGGCTGGTCT | CCCCTAACCGCGAGT | GAGAACGGGCCAGGA |
| GAGCCCCTCTGCCTG | AGATGTGCTTTGTTA | CTGACCGCGAGTGAT |
| GGGCCGGTCTCCAGC | AAAAAATTGAGAAAT | ATCAGGGACACAAAC |
| GGCTGGTCTCCAGCT | ATGCGGAGCCGAAGC | CGCCCCTACTGGGAA |
| CCCTACTGGGAAGTG | GCTGTGTTGACCGGG | TGCAGACGGAGTCTC |
| GAGGTGTACCCAACA | TTTCGCTGTGTTGAC | AGGGCGGTGCAAGAT |
| GGATGTGGGGAGCGC | GCTGGGATTGCAGAC | TGTTCACGTGTTTAT |
| CCTTTGTTCACATGT | GATGCCGAGCCGAGG | TGCAGACGGAGTCTG |
| ATGTTGCCCAGGCTG | CGTGATCTCGGCTCG | GAAAAGGGGGAAATG |
| CTTTGTTCACATGTT | TGTGACCTTATCCCC | GCCGCCCATCGTCTG |
| AAAGCTGGACGGTAC | AATGTTGCCCAGGCT | ATGTGCTTTGTTAAA |
| GATGGGCCATGATGA | CTTTCCACGGTCTCC | CTGTGTAGAAAGAAG |
| CTAACCGCGAGTGAT | AGTGCCTGCGATTGC | CGTGTTGGCCGGGCT |
| GCTTTGTTAAACAGA | CCGGTCTCCAGCCCC | GTGTGCCCAACAGCT |
| CCGGCCGCCATCCCA | AGAACGGGCCAGGAT | CAGCCGCCCCGTCCG |
| CCCCAACCCTGTGCT | AGGCTGGAGTGCAGT | TGCCGAGGCTGGACT |
| GTCTCCAGCTCCTGA | GCCGAGCCGAAGCTG | CTAGGAAGTGAGGAG |
| AGCCAAAGCTGGACG | GTGTAGAAAGAAGTA | AAACAGATGCTTGAA |
| GTCTCCAGCTCCTGG | TTTCATTTTGTTCTG | AGTACCCAGGGACAC |
| TGCGATTGCAGGCGC | AGAGCCGGATTGCAG | TCTCCCTCTCCCTGT |
| GAAAAGATAGAGAAA | GGGATGGGCCATGAT | TGTTGGCCGGGCCGG |
| GGTTGCCGGGTCTGT | GCGGCTTTGTGGAAT | GCAGTGGCGTGATCT |
| GCTGGTCTCCAGCTC | TGAGGAGCCCCTCTG | AGCCGGATTGCAGCC |
| GCAGCCTCTGCCCGG | AAATCGGATTGTTGC | GGCCGCAGGGACCTC |
| TTGCAGGCGCGCGCC | TTATCAATAAAAAAA | AAAGAAAAGGGGGAA |
| CCACATCCCCCTCTC | ACACCCAAGAATTAT | ACGGGCCAGGATGAC |
| GGGATGTGAGGAGCG | CACCTCCCAGCCGCC | AGCCTGCCGAGTGCC |
| CTCCGCCCGGCCGCC | GGCCTCCCAAAGTGC | AACACTGCGGAAGGC |
| GGGATGTGAGGAGCC | TGTGCCCAACAGCTC | TGTTTATCTGCTGAC |
| AGACTCCATTTTGTT | GCCCGGCCGCCCCGT | TGTGTAGAAAGAGGT |
| ATCGGATTGTTGCTG | CTCAAGTACCCAGGG | TGCAGTGGCGTGATC |
| GAGGTGGGGGGGTCA | CAGGGTCCTCTGCCT | CGCAGGGTCCTCTGC |
| CCTCTGCCCCGCCGC | CATCCCATCTAGGAA | CACTGCAACCTCCCT |
| CCTCTGTGAGAAACA | TTGGCCTCCCAAAGT | TGTGCTTTGTTAAAC |
| GACCTTTGTTCACAT | TGATGACGATGGCGG | TATGACCCTGCCAAA |
| CTGCCATCTCGGCTC | GGTGCCGGGATTGCA | CTCTGCCCGGCCAGC |
| TGCTGACCTTCTCTC | ATGCTGTTGATCTGT | CCACTATTGTCCCAT |
| CTCTCCCTGTCCCCT | CAATGGTGCCCAGGC | CCACTATTATCCTAT |
| GCCGCCCAGTCTGGG | GGGATTGCAGGCGCG | ATGACAATGGCGGCT |
| CTGCGGAAGGCCGCA | TCCAGCCCCTAACCG | CTGTACTAAGAAAAA |
| CCCGGCCGCCCATCG | TTGGCCTCCCAAAGA | TGTGAGGAGCCCCTC |
| AAAAATTCTTCTGCC | CGGTGCAAGATGTGC | TTCGCCGTGTTGGCC |
| GCCGAGTGCCTGGGA | GCTGTGTCAACTCAG | ATAGAAGTAGACATG |
| CTGCTGACCTTCCCT | CCGCCCGGCCGCCAT | TAATCTCAAGTAATC |
| ACGCCTGACTGGTTT | CCTCTTTCCACGGTC | AAAGAGAGATCAGAT |
| ACCCAACAGCTCATT | GTTTTGTGGAATAGA | TCATCACCACTCCCT |
| GGATTGTTGCTGTGT | AAATCGGATGGTTGC | TGCTGTTGATCTGTG |
| CCCTGCCTGATTCTC | GCTCGCTGCAACCTC | CATCCCCCTCTCCGA |
| TGCCGTGTCTGTGTA | GCTCGTTAAGAGTCA | GAGGAGCCCCTCTGC |
| GGAAAGGTGGGGAAA | ACCCAAGAATTATCA | CTGTACTGCCGCCAT |
| GTGGGGAAAAGAAAG | AGGCTGGACTGTACT | GGTGGAGACGGGGTT |
| TGGGAGACTTCATTT | GGCCACCGCCCCGTC | GTTTTCGTATTTTTT |
| TCTGGGAGGTGTGCC | CGGATGGTTGCCGTG | ACCTCTGCCCCGCCG |
| GGACACAAACACTGC | TACCCAGGGACACAA | ACTGTACTGCTGCCA |
| TGCCTGGCCGCCCAG | GACCTTCCCTCCACT | TGTACCCAACAGCTC |
| ACGGAGTCTCGCTCA | AACCCTGTGCTCTCT | GATGGTTGCCGTGTC |
| GTCTCGCTCACTCAG | CTGCCACATCCCCCT | CAGTGGCGTGATCTC |
| TCAAGTAATCAGGGA | GTTGCCCAGGCTGGA | GTGTCCACTCAGGGT |
| GCGGTTTTGTCGAAT | GTTCTGTACTAAGAA | TAGAAAGAGGTAGAC |
| GCCAAAGCTGGACGG | TTGTCGAAAAGAAAA | CTCGGGCTCCAGTGA |
| CACTCCCTAATCTTA | TCCCCCTCTGCGAGA | GCCCAGCGGCTCATT |
| ACCACTCCCTAATCT | CCTGCCTCAGCCTGC | CAGTGATTCTCCTGC |
| GCGGTTTTGTCGAAA | TTACTGTGTCTGTGT | GCCTCTGCCCGGCCA |
| TTGTGGAATAGAAAG | TGGGAGGTGAGGGGC | TGTGTCAACTCAGGG |
| CCCGTGCTCTCTGAA | CTTCTGCCTTGGGAT | TGTGTCTGTGTAGAA |
| TAGGAAGTGAGGAGC | GACCTTACCCCCAAC | TTGTCCCATGACCCT |
| AAAAATTGAGAAATC | TTCTCCTGCCTCGGC | AAACACCCAAGAATT |
| GCGGAGCCGAAGCTG | CCGCAGGGTCCTCTG | AAGGGGGGAAAGGTG |
| CTCTCATGCGGAGCC | AGGTGCCGGGATTGC | TTTTGTATTTTTGGT |
| GGTGAGGGGCGCCTC | CCCGGCCACCACCCC | TTATCTGCTGACCTT |
| AGGCCGCAGGGTCCT | CATGGGAGACTTCAT | AAGAGCCGGATTGCA |
| GCCACGCCTGACTGG | TGCCTGGCTGCCCAG | AAGTGAGGAGCCCCT |
| CGGCCGCCATCCCAT | TATTATCCTATGACC | CCTGGCCTCGAGTGA |
| TCTCCAGCTCCTGGC | CCTGCCTCGGGCTCC | ACTGCAACCTCCCTG |
| TCCGAGAAACACCCA | GGGGGAAAGGTGGGG | GCCCGGCCACCGCCC |
| CACTCAGGGTTAAAT | CTCCCTGCCTCGGGC | AACTCAGGGTTAAAT |
| CGGCCACCGCCCCGT | CAGCCCCTAACCGCG | CTGGCCGCCCATCGT |
| GTAGACATAGGAGAC | ACCTACACCTCCCAG | CAGGCTGGAGTGCAG |
| AGTGCTAAGATTGCA | AAGGTGGGGAAAAGA | TGCCACATCCCCCTC |
| TTCTGCCTTGGGATG | TCCCCTCTCTCCACG | GGCCGGGCCGGTCTC |
| TCCCCTCTTTCCACG | GATGTGGGGAGCGCC | CTGACTGGTTTTTGT |
| GGGGAAAAGAAAGAG | GACCCTGCCACATCC | AGGGTTAAATGGATT |
| AGATTGTTACTGTGT | AGCGGCTCATTGGGG | TGCCGAGTGCCTGCG |
| TCGCTACAACCTACA | ATCAATAAAAAAAAT | AGTCTGGGAAGTGAG |
| CTCCCAAAGTGCTAA | GCCTTGGCCTCCCAA | TTGTTACTGTGTCTG |
| CCCAGCGACCATTGA | TTAAGGGCGGTGCAA | CGCTGTGTTGACCGG |
| CCTCGGCCTGCCGAG | ATGGCGGCTTTGTGG | ACGTGTTTATCTGCT |
| CGAGATTGCAGCCTC | AAGGGCGGTGCAAGA | AACATGTGCTGTGTC |
| AATACTAAAAAAAAA | GTGCCGAGATTGCAG | GCCATGATGACGATG |
| GCTCCTGGCCTCGAG | GCCTGCCTTGGCCTC | AACGGGCCATGATGA |
| TCGTCTGAGATGTGG | GCCGCCCCGTCCGGG | TGTGCTCTCTGAAAC |
| ATCAATAAATACTAA | CCAAATCCCCCTCTC | AGGAGCGCCTCTTCC |
| GAAGTGAGGAGCGTC | ACCTTTGTTCACATG | CTCTGCCTGGCCGCC |
| GGATTGCAGGCACGC | CCAAATCCCCCTCTG | TCGGATGGTTGCCGG |
| AAATTCTTCTGCCTT | TATCCTATGACCCTG | GGCCGCCACCCCGTC |
| CGCTACAACCACCTC | CTGTGTTGACCGGGC | CTCCTGCCTCAGCCT |
| GGCGGGAAAGGTGGG | GTTTTGTCGAATAGA | GCTCAATGGTGCCCA |
| TCTCTGCCCGGCCGC | GGTCTCCCTCTCATG | AATGTGGGGAAAAGA |
| ATGGCGGTTTTGTCG | GCTAAGATTGCAGCC | CGGATGGTTGCCGGG |
| CAAGAATGATCAATA | TTAAATGGATTAAGG | TTCTGTACTAAGAAA |
| CTGTGACCTTACCCC | TCTGGTTCACTCAGT | AAAGGGGGGAAAGGT |
| TGCAGCCTCTGCCCG | TGCCCGGCCGCCATC | TCTGTACTAAGAAAA |
| AACCTTACCCCCAAC | CGCCCGGCCAGCCGC | CGCCTCTTCCCGGCC |
| TGGAATAGAAAGGGG | CCCTTCTGGGAAGTG | CCACCGCCCCGTCTG |
| AAGTAATCAGGGACA | TCCAGCTCCTGACCG | TGATCTGCCCGCCTC |
| AACCACCTCCCAGCC | TGGGGAGCGCCTCTG | AGTAGACATGGGAGA |
| GTGTCAACTCAGGGT | TCGAGTGATCTGCCC | CATGTGCTGTGTCCA |
| GTGACCTTATCCCCA | GTCCGGGAGGTGAGG | CAACCACCTCCCAGC |
| GGGTTTCGCTGTGTT | GCGATTGCAGGCGCG | CTCTCCCTCTCCCTG |
| CTCCGAGAAACACCC | TTAAACAGATGCTTG | CCGAGCCGAGGCTGG |
| GCCTTGGGATGCTGT | TGTTGCCCAGGCTGG | ACAACCTCCACCTCC |
| GACAATGGCGGCTTT | TCCCGTCTAGGAAGT | CAGGGACACAAACAC |
| TAACCGCGAGTGATC | GGTCTCCCTCTGATG | TCCTGTTGATCTGTG |
| AGACGGGGTTTCGCC | CTGGGATTGCAGGCA | CCCCTCTGCCTGGCC |
| GACTGTACTGCTGCC | CCAAAGCTGGACGGT | GGGAAAAGATAGAGA |
| GGTTTTGTCGAATAG | TGACTGGTTTTCGTT | TCACCACTCCCTAAT |
| TCCTCTGCCTAGGAA | AATCCCCCTCTGTGA | CTGACTGGTTTTCGT |
| GTCTGGGAGGAGGTG | TTTTTTTTGGTGGAG | CCGCCCCTACTGGGA |
| GTCTGGGAGGTGTGC | TGTTAATCTATAACC | CCTATGACCCTGCCA |
| CTCCCTCTGATGCCG | ACCCAGGGACACAAA | AGCCGAGGCTGGACT |
| AGACGGGGTTTCGCT | CGGCCTGCCGAGTGC | CCCCCAACCCCGTGC |
| ACATGTTTATCTGCT | TATTTTTTGGTGGAG | CGTCTGGGATGTGAG |
| GAATAGAAAAGGGGG | GCCCCTACTGGGAAG | CCTGCCGAGTGCCTG |
| TGGGATGCTGTTGAT | CGTCTGAGATGTGGG | ATCACCACTCCCTAA |
| TGGCCGGGCTGGTCT | TGACTGGTTTTCGTA | AGGCGCGCGCCGCCA |
| TCAATAAAAAAAATT | GTGCCTGGGATTGCA | AGCGCCTCTGCCCCG |
| GAAATGTGGGGAAAA | TACCCAACAGCTCAT | TTTGTCGAATAGAAA |
| GCTACAACCTCCACC | CGAAAAGAAAAGGGG | GGTGTACCCAACAGC |
| CGCCTGACTGGTTTT | GGCTGGACTGTACTG | TTCACTCAGTGCTCA |
| CTGGGAAGTGAGGAG | CCAACAGCTCATTGA | GACTGGTTTTGGTGG |
| GATCCGCCAGCCTCG | GGGATCCTGTTGATC | GGGACACAAACACTG |
| GTACCCAGCGACCAT | AAAGGGGGAAATGTG | TCGAATAGAAAAGGG |
| TCTTCCCGGCCGCCA | CTGTACTGCCGTGAT | GAAATCGGATGGTTG |
| GCGCGCGCCGCCACG | AGGTGTACCCAACAG | GGCCAGCCGCCCCGT |
| CGGCTTTGTGGAATA | CCCGTCCGGGAGGTG | CTGGAGTGCAGTGGC |
| GTCTCCCTCTGTTGC | TCTCGGCTCGCTGCA | AGAAAAATTCTTCTG |
| CTCCCCTCTTTCCAC | AATCTTAAGTACCCA | CACTATTGTCCCATG |
| TCCCAGCCGCCTGCC | CCTCGGCCTCCCGAG | CCGGCCACCACCCCG |
| GCTCTCTGAAACATG | AGACCTTTGTTCACT | CCGCCATCCCATCTA |
| GGGAAAAGATTGAGA | ATGATCAATAAAAAA | TCTGTGAGAAACACC |
| CGCGCGCCGCCACGC | GCCATCCCGTCTAGG | CAATGTTGCCCAGGC |
| CCCTCTGATGCCGAG | ATTTTTTTGGTGGAG | GTCTGTGTAGAAAGA |
| TTGGGATGCTGTTAA | AGAAAAGGGGGAAAT | TGACAATGGCGGCTT |
| TGCCCAGTCTGGGAA | TTTTCGTTTTTTTTT | CCCTCTGCCTGGCCG |
| CACCCAAGAATGATC | ATGTGGGGAGCGCCT | TCCCTGTCCCCTCTT |
| CTCCAGCTCCTAACC | TCTCAAGTAATCAGG | CGAGGCTGGACTGTA |
| GGCGGGAAGGGTGGG | GATCAATAAATACTA | TGACAATGGCGGTTT |
| CTGATTCTCCTGCCT | TCTGCTGACCTTCCC | AAAAAAATTAAAAAA |
| AGGCGGGAAGGGTGG | ACTGCCGTGATCTCG | TCTGGGATGTGAGGA |
| CCCCCGCCCGGCCAG | AGCTCATTGAGAACG | GGGAAGGGTGGGGAA |
| CCTGGCCGCCCAGTC | ATGTGAGGAGCGCCT | AAAAGATAGAGAAAT |
| GTCTGGGAAGTGAGG | TACTGTGTCTGTGTA | TGTACTAAGAAAAAT |
| GTGTACCCAGCGACC | GGGAGGTGTACCCAA | TGCTGTGTCCACTCA |
| GGAAAAGAAAGAGAG | GGGGGGAAAGGTGGG | AAGAGTCATCACCAC |
| CTGCCTGGCCGCCCA | GCCTCGAGTGATCTG | CTCTCCCCTCTCTCC |
| TCTGCCCGGCCACCG | TCTTTCTACGGTCTC | ATGTTTATCTGCTGA |
| CGGAGTCTCGCTCAC | GCCCCGTCCGGGAGG | CAAACACTGCGGAAG |
| GCTGTTGATCTGTGA | TCGGCTCGCTACAAC | CATGTTTATCTGCTG |
| TCTGCCCGGCCACCA | GACCTTATCCCCAAC | TGCAGGCACGCGCCG |
| GGGGAGCACCTCTGC | CTGATGCCGAGCCGA | CCGAGAAACACCCAA |
| TGCCGAGCCGAGGCT | TGTGTTGGCCGGGCC | AGGTGTGCCCAGCGG |
| TCCCTCTCCCTCTCC | ACCGGGCTGGTCTCC | CCGTGTCTGTGTAGA |
| AGGCAGCATGCTCGT | CTACGGTCTCCCTCT | TGTCGAATAGAAAAG |
| GAGTGATCTGCCCGC | GCCATCTCGGCTCAC | CGGGGTTTCGCTGTG |
| GCCCGGCCAGCCGCC | CTACACCTCCCAGCC | GAGTGCCTGCGATTG |
| CGGTACTGCTGCCAT | TTTTTGTATTTTTTG | TACAACCTCCACCTC |
| TCAGCCTGCCGAGTG | TGTGTTGGCCGGGCT | CCTTCCCTCCACTAT |
| CCCTCTTTCTACGGT | CTCTGCCTAGGAAAA | TGGGGAAAAGATTGA |
| TGCCTTGGGATCCTG | GGACGGTACTGCTGC | TCCCTCTGTTGCCGA |
| GAGGGGCGCCTCTGC | CGGGAAGGGTGGGGA | GCAGGCACGCGCCGC |
| TCCGCCCGGCCGCCA | CGCCCGGCCGCCATC | TAACCTTACCCCCAA |
| ACCTTCCCTCCACTA | TGCTGTGTCTGTGTA | CCGCCCGGCCAGCCG |
| CTGGGATTGCAGGCG | ATCAATAAAAAAAAA | CTCCCAAAGTGCCGA |
| GTTAATCTATAACCT | GGTCTCCAGCTCCTA | GCCCAACAGCTCATT |
| TGTGGGGAGCACCTC | GCTCATTGAGAACGG | GCCATCCCGTCTGGG |
| GCTGTGTTGGCCGGG | GGTCTCCAGCTCCTG | CCTTCTCTCCACTAT |
| CCCCTTCTGGGAAGT | TCTAGGAAGTGAGGA | CTGCCTCAGCCTGCC |
| CCAGCCCCTAACCGC | GTTAAATGGATTAAG | TCATTGGGGATGGGC |
| AGATGTGGGGAGCGC | GGGGAAAAGATTGAG | CCGCCCCGTCCGGGA |
| TCTCGTTCACTCAGT | CCCTCTCTCCACGGT | AAGGCGGGAAAGGTG |
| CTGGACGGTACTGCT | GGAGCGCCTCCGCCC | CGTTTTTTTTTGGTG |
| GGGGGTCAGCCCCCC | AGCCGAAGCTGGACT | CCCCAACCCCGTGCT |
| GAAAGGCGGGAAGGG | CGCCCCGTCTGGGAA | GTCTCGTTCACTCAG |
| ATAAAAAAAAAAAAA | AGCGCCTCTGCCCGG | TGGGGAGCACCTCTG |
| GGTTTTGGTGGAGAC | CCAGCCGCCCCGTCC | CTGACCTTCTCTCCA |
| TGCCGAGCCGAAGCT | TGATCAATAAAAAAA | GGCCGCCCCTTCTGG |
| AGAGATCAGATTGTT | CAACCCTGTGCTCTC | GACTGGTTTTCGTTT |
| GAAGTAGACATAGGA | AAGGCGGGAAGGGTG | ATGACGATGGCGGTT |
| GAAGGGTGGGGAAAA | GTACTGCTGCCATCT | AGTGCTCAATGTTGC |
| CAGCGGCTCATTGGG | TGTTGCCGAGGCTGG | TGGATTAAGGGCGGT |
| GGAAGGGTGGGGAAA | CCAGCCGCCCCGTCT | CTGCCTGGCTGCCCA |
| CCCCGTCTGGGAGGA | TGAAACATGTGCTGT | TTTGTGGAATAGAAA |
| CACATCCCCCTCTCC | GAGATTGCAGCCTCT | GTGGGGGGGTCAGCC |
| GCCTCCCAAAGTGCT | CAAATCCCCCTCTCC | CTTGGGATGCTGTTG |
| GAGAAATCGGATGGT | GGCGCGCGCCGCCAC | CTTGGGATGCTGTTA |
| GCCCCCCGCCCGGCC | AAGTAGACATGGGAG | AGATCAGATTGTTAC |
| CGACCATTGAGAACG | TCCTATGACCCTGCC | GCCTGGCTGCCCAGT |
| TCCCAAAGTGCCGAG | ATGCTTGAAGGCAGC | TCGGGCTCCAGTGAT |
| CCCCGTCTGGGAGGT | TCCCCCTCTGTGAGA | CTTTGTGGAATAGAA |
| CACCCAAGAATTATC | ATTGCAGACGGAGTC | TAAATGGATTAAGGG |
| GCCTCCCAAAGTGCC | CCTTACCCCCAACCC | TCGGCTCACTGCAAC |
| TCCCTAATCTTAAGT | CTGGACTGTACTGCC | CTCATGCGGAGCCGA |
| CGGGAAAGGTGGGGA | GGACCTCTGCCTAGG | GCTACAACCACCTCC |
| TTCTGCCTTGGGATC | CGCCCCGTCTGGGAG | CTGCCTCGGCCTGCC |
| AGCCCCCCGCCCGGC | CACTTGTTTATCTGC | CGGCCAGCCGCCCCG |
| CCAGGCTGGAGTGCA | CTGCAACCTCCCTGC | TTGATCTGTGACCTT |
| AGAAATCGGATGGTT | TGCGATTGCAGGCAC | AGAAATCGGATTGTT |
| AAAATTGAGAAATCG | CTCTGTTGCCGAGGC | AACACCCAAGAATTA |
| TCTGCCTTGGGATCC | AAGGCCGCAGGGACC | CGCCATCCCGTCTAG |
| GCCTGGCCGCCCATC | TGCCTCGGCCTGCCG | GATGCTTGAAGGCAG |
| GATTAAGGGCGGTGC | GCTCAATGTTGCCCA | GGCTCGCTGCAACCT |
| GCCGCCCCTTCTGGG | CCTCTCCCTCTCCCC | GATAGAGAAATCGGA |
| CAGCCCCCCGCCCGG | GGGAGGTGAGGGGCG | TCCGGGAGGTGGGGG |
| GCGCCGCCACGCCTG | GAGGTGGGGGGCGCC | GAGACGGGGTTTCGC |
| CTGCCCGGCCGCCCA | CAGCCGCCCCGTCTG | TGCCTTGGGATGCTG |
| CCCCTCTGCCTGGCT | ATGTGCTGTGTCCAC | GAGCGCCTCCGCCCG |
| CTGCCCGGCCGCCCC | CCTCTCCCTCTCCCT | CTGGGAGGTGAGGGG |
| CAGGCGCGCGCCGCC | TTCTTCTGCCTTGGG | TGTAGAAAGAGGTAG |
| GCTACAACCTACACC | GGAGACTTTTCATTT | ATCCCCCTCTGCGAG |
| GGTCAGCCCCCCGCC | GGTTTCGCCGTGTTG | GCCATGATGACAATG |
| TGATCTGTGACCTTA | GCCTCGGGCTCCAGT | AATCGGATGGTTGCC |
| TAAGTACCCAGGGAC | AGCTCCTGACCGCGA | TAAAAAAAATTAAAA |
| GTTGACCGGGCTGGT | CTGCGATTGCAGGCA | CCTCTGATGCCGAGC |
| TGGCCGCCCAGTCTG | CTGCGATTGCAGGCG | TTTGTTCACGTGTTT |
| GCGGAAGGCCGCAGG | GCCTGCCGAGTGCCT | GCGCCTCCGCCCGGC |
| TACTGGGAAGTGAGG | TTCCCGGCCGCCATC | CCCGGCCAGCCGCCC |
| TTCGTATTTTTTTGG | CTGGACTGTACTGCT | TCCCCCTCTCCGAGA |
| GGGAAAGGTGGGGAA | CAGATTGTTACTGTG | AAGTAGACATAGGAG |
| CGAGTGCCTGCGATT | TAAATACTAAAAAAA | GACGGAGTCTCGTTC |
| ACCTCTGCCTAGGAA | AGGAGCGCCTCCGCC | TGCCGGGATTGCAGA |
| CGCCACGCCTGACTG | CGCCCCGTCTGGGAT | GGTGCTGGGATTGCA |
| CCTTGGCCTCCCAAA | GGAAATGTGGGGAAA | CTCAGTGCTCAATGT |
| TCAATAAATACTAAA | CTCCACCTCCCAGCC | GTCGAAAAGAAAAGG |
| AAAATTAAAAAAAAA | GTACTGCCGCCATCT | TGGGGAAAAGAAAGA |
| CTCAGTGCTCAATGG | TCTTCTGCCTTGGGA | TGGGGAAAAAATTGA |
| CGTCTCTGCCTGGCC | GTGAGGAGCCCCTCT | TTTTTGGTGGAGACG |
| ACTGCCGCCATCTCG | GAGCACCTCTGCCCC | AATAAAAAAAAAAAA |
| TTGTTGCTGTGTCTG | TTATCCTATGACCCT | AGCATGCTCGTTAAG |
| TCGGATTGTTGCTGT | CTTAAGTACCCAGGG | CGGCCGCCCCTACTG |
| CCTGTTGATCTGTGA | GATGTGAGGAGCGCC | AGAATTATCAATAAA |
| CTTCCCGGCCGCCAT | CCCAGTCTGGGAAGT | TAAACAGATGCTTGA |
| ATAGGAGACTCCATT | GATCAGATTGTTACT | CTGGGATGTGAGGAG |
| GCCACCCCGTCTGGG | CCGCCAGCCTCGGCC | CTTGGCCTCCCAAAG |
| TGTGGAATAGAAAGG | TGTCCCCTCTTTCCA | GACGATGGCGGTTTT |
| CCGCAGGGACCTCTG | ACTTGTTTATCTGCT | TTGTCGAATAGAAAA |
| CGCCTCCGCCCGGCC | CTCTCTGAAACATGT | GCCCGGCCGCCCATC |
| CCCTAATCTCAAGTA | GACGGTACTGCTGCC | CGGAAGGCCGCAGGG |
| AGACATGGGAGACTT | GCACGCGCCGCCACG | CCATGACCCTGCCAA |
| ATCTCAAGTACCCAG | GGAGCGCCTCTTCCC | ACTATTGTCCTATGA |
| ACACTGCGGAAGGCC | CATTTTGTTCTGTAC | CTCTGCCTGGCTGCC |
| TTGCCGGGTCTGTGT | GGAGGTGTGCCCAGC | GTGCAAGATGTGCTT |
| TCGCTGTGTTGACCG | AACCGCGAGTGATCC | GATTGTTGCTGTGTC |
| CCCAGGGACACAAAC | GTACTGCCGTGATCT | CCTCTGCCCGGCCAC |
| CTGCCTTGGGATCCT | CAAGATGTGCTTTGT | CTACAACCTACACCT |
| GGGCCATGATGACAA | CCTCAGCCTGCCGAG | ATCGGATGGTTGCCG |
| TGCCTGGGATTGCAG | TGCAACCTCCCTGCC | CTCTGCCCGGCCACC |
| CTGTGTCTGTGTAGA | CCTCGGGCTCCAGTG | TCTGAAACATGTGCT |
| TCCATTTTGTTCTGT | CCCTCTGCGAGAAAC | CCATCCCATCTAGGA |
| ATGGTTGCCGGGTCT | CAGTGCTCAATGTTG | CCCGGCCGCCCAGTC |
| CGGGAGGTGGGGGGG | GGAGCGTCTCTGCCT | CTGCCCGCCTCGGCC |
| AAATGTGGGGAAAAG | GCCGTGATCTCGGCT | CCGGCCGCCATCCCG |
| CTCGGCCTGCCGAGT | CCTCTGCCCGGCCGC | TCTGGGAGGAGGTGG |
| TGCCATCTCGGCTCA | CATGCGGAGCCGAAG | GCCACCGCCCCGTCT |
| CCAAAGTGCCGAGAT | CTTCATTTTGTTCTG | CTTGGGATCCTGTTG |
| CCGCCCCTTCTGGGA | GAGGTGTGCCCAGCG | TGAGGAGCGTCTCTG |
| GGAAAAGATAGAGAA | GGAGCGTCTCTGCCC | CGCGCCGCCACGCCT |
| GGTGGGGAAAAGATA | TCTATAACCTTACCC | GAAGGCAGCATGCTC |
| TGCTGTGTCAACTCA | GGGTCCTCTGCCTAG | CCGCCATCTCGGCTC |
| CTTTTCATTTTGTTC | ACATGGGAGACTTTT | CAGGGTTAAATGGAT |
| GACATAGGAGACTCC | CTTTCTACGGTCTCC | GGAGGAGGTGGGGGG |
| CCCGTCTGGGAGGTG | ACCCCCAACCCTGTG | CTATTATCCTATGAC |
| GGGAAAAAATTGAGA | TGATGACAATGGCGG | CGCTGTGTTGGCCGG |
| GACTGTACTGCCGCC | TGGGAGGTGGGGGGC | GCTCGCTACAACCTC |
| CCCCGTGCTCTCTGA | CCTCCGCCCGGCCGC | GCTCGCTACAACCTA |
| GATTCTCCTGCCTCG | TGACGATGGCGGTTT | TAGAGAAATCGGATT |
| CCGGCCGCCACCCCG | TCTCCCTCTGTTGCC | TCTGCCCGCCTCGGC |
| GGTGGGGAAAAGATT | CGGCCGCCACCCCGT | AACAGCTCATTGAGA |
| GCCGAAGCTGGACTG | AAAAAAAATTAAAAA | CCGTCTGGGATGTGA |
| ACAGATGCTTGAAGG | AAATGGATTAAGGGC | CTGCCGAGTGCCTGG |
| GGTTTTTGTATTTTT | CATTGAGAACGGGCC | GGTGGGGGGCGCCTC |
| ATTAAGGGCGGTGCA | GGATGTGGGGAGCAC | CTCTCCCCTCTTTCT |
| GGAGTCTGGTTCACT | TGTGGGGAAAAGAAA | GAACGGGCCATGATG |
| GTATTTTTTGGTGGA | CGTCTGGGAGGAGGT | GGAAGGCCGCAGGGT |
| CCGGGAGGAGGTGGG | CATCGTCTGAGATGT | ATCTGCCCGCCTCGG |
| TGGAGTGCAGTGGCG | CGGCCACCACCCCGT | ACATCCCCCTCTCCG |
| AAATACTAAAAAAAA | CCCTCTCCGAGAAAC | CTCTCCCCTCTTTCC |
| ATCCCCAACCCTGTG | CCCGGCCACCGCCCC | AGCCGCCCCGTCTGG |
| CCGTCCGGGAGGAGG | GTACCCAACAGCTCA | CAAAGTGCTAAGATT |
| GCCCGGCCGCCCAGT | GGAGTCTCGTTCACT | GGAAGGCCGCAGGGA |
| AGAACGGGCCATGAT | ACACCCAAGAATGAT | CACGGTCTCCCTCTC |
| AGCGCCTCTTCCCGG | TCGTCTGGGATGTGG | ACCTTATCCCCAACC |
| CTTTGTTCACGTGTT | GCGAGAAACACCCAA | GGTGCAAGATGTGCT |
| GGAAAAAATTGAGAA | TCGTCTGGGATGTGA | ACCTTTGTTCACGTG |
| TGTACTGCCGCCATC | TCTCCCTCTGATGCC | TGTCCACTCAGGGTT |
| AGCCGCCTGCCTTGG | GGAAGTGAGGAGCGT | GCCGCAGGGTCCTCT |
| AAAGAAAGAGAGATC | CTCAATGTTGCCCAG | CCGGCCGCCCCTACT |
| GCGTCTCTGCCCGGC | CCTGGCCGCCCATCG | TGGGAGGTGTGCCCA |
| TGGATAGAAGTAGAC | GAAAAAATTGAGAAA | GCGCGCCGCCACGCC |
| ATGTGGGGAGCACCT | ATGGGAGACTTTTCA | CCTGGCTGCCCAGTC |
| GACACAAACACTGCG | AGCCCCTAACCGCGA | CTGGGAGGAGGTGGG |
| TCCAGCTCCTGGCCT | CATCCCGTCTAGGAA | ATCTAGGAAGTGAGG |
| GGATGACAATGGCGG | TGTTACTGTGTCTGT | GTGCCCAACAGCTCA |
| AATTCTTCTGCCTTG | CGAGTGATCTGCCCG | ACTCAGTGCTCAATG |
| GATCAATAAAAAAAA | GGCCGCCCCGTCTGG | ATGTGCTGTGTCAAC |
| CTAATCTCAAGTACC | CTCCCGAGGTGCTGG | CCGCCCCGTCTGGGA |
| ACAACCACCTCCCAG | GTGTTGGCCGGGCCG | GTCTGGTTCACTCAG |
| GCCCCTAACCGCGAG | CCCAGGCTGGAGTGC | TGTGTAGAAAGAAGT |
| GACTGGTTTTCGTAT | GACCATTGAGAACGG | TTTTTTTTTGGTGGA |
| CGGGCCATGATGACA | TCTCATGCGGAGCCG | AAAGAAGTAGACATA |
| CTCCTGCCTCGGCCT | CACCACCCCGTCTGG | CCATCCCGTCTAGGA |
| CGGGCCATGATGACG | GTGAGGAGCGTCTCT | AAAGAAGTAGACATG |
| CCCTCTCATGCGGAG | AACCAGAGACCTTTG | GCCCGGCCGCCCCTA |
| TAGAAAGGCGGGAAA | CCCCTACTGGGAAGT | GAGAAATCGGATTGT |
| TAGAAAGGCGGGAAG | ACTATTATCCTATGA | CCCTCTCCCCTCTTT |
| ATCTCGGCTCACTGC | AGTGAGGAGCGCCTC | GATGTGCTTTGTTAA |
| TCCCGGCCGCCATCC | TTGTTCTGTACTAAG | ATCAGATTGTTACTG |
| GGAGGTGGGGGGGTC | AAATCCCCCTCTCCG | GTGAGGGGCGCCTCT |
| GTTGCCGAGGCTGGA | GCTTTGTGGAATAGA | GAAAGAAGTAGACAT |
| CTCGTTAAGAGTCAT | CAGATGCTTGAAGGC | CTGCCTCGGGCTCCA |
| TCTGATGCCGAGCCA | GCTGTGTCTGTGTAG | TATTTTTGGTGGAGA |
| ATGATGACGATGGCG | CTATTGTCCCATGAC | CCGCCCATCGTCTGG |
| TCTGATGCCGAGCCG | TCACTCAGTGCTCAA | CATCTCGGCTCACTG |
| CCTTCTGGGAAGTGA | TGGGGGGCGCCTCTG | GACTGGTTTTTGTAT |
| ACTCAGGGTTAAATG | CCGGCCAGCCGCCCC | AAAGGTGGGGAAAAG |
| ATTCTTCTGCCTTGG | CTGGCCGCCCAGTCT | GATGACAATGGCGGC |
| TGCGAGAAACACCCA | AAGAAGTAGACATGG | CTGGGAGGTGTACCC |
| GCCTCCCGAGGTGCT | AAATTAAAAAAAAAA | GGAATAGAAAGGGGG |
| TCACATGTTTATCTG | CTGCCCGGCCGCCAC | GAAAAATTCTTCTGC |
| GGATTAAGGGCGGTG | GGAGCCGAAGCTGGA | GATGACAATGGCGGT |
| CCACTCAGGGTTAAA | CCTCTGCCTGGCCGC | CTGCGAGAAACACCC |
| TTGTTAAACAGATGC | GGTCTCCAGCCCCTA | CCTCTCCCCTCTCTC |
| GCCTCCCGAGGTGCC | CTGCCCGGCCGCCAT | ACTTTTCATTTTGTT |
| ATCCCGTCTGGGAAG | AACAGATGCTTGAAG | CTCAGCCTGCCGAGT |
| GGAGGTGTACCCAAC | ATTGTCCCATGACCC | CTCACTCAGTGCTCA |
| TTTCTACGGTCTCCC | GTCCTATGACCCTGC | GCAGACGGAGTCTGG |
| CTGTGTAGAAAGAGG | GAGGCTGGACTGTAC | CTCTGCCCCGCCGCC |
| ACTCCCTAATCTTAA | TCCCTCTCATGCGGA | CACATGTTTATCTGC |
| AACCTCCACCTCCCA | GGGCCAGGATGACAA | GTTTTGGTGGAGACG |
| TTTTGTTCTGTACTA | TTTTGTATTTTTTGG | CTCATTGGGGATGGG |
| TCGGATGGTTGCCGT | GAAAAGATTGAGAAA | ATCCCCCTCTGTGAG |
| CAGCCTCTGCCCGGC | CTCTCCCTCTCCCTC | GCCCGGCCGCCATCC |
| GCCAGCCGCCCCGTC | CGTCTGGGATGTGGG | TGTATTTTTTGGTGG |
| GTCAACTCAGGGTTA | GTATTTTTGGTGGAG | GGCAGCATGCTCGTT |
| AAGAAAAGGGGGAAA | TGCCTCGGGCTCCAG | CCAGCGGCTCATTGG |
| CCCTAATCTTAAGTA | GGCCGGGCTGGTCTC | GGGGGAAATGTGGGG |
| AGTAGACATAGGAGA | AACCTACACCTCCCA | AGGTGGGGGGCGCCT |
| GCCGGGCCGGTCTCC | CTCTTTCTACGGTCT | TCGGCCTGCCGAGTG |
| CGGTCTCCCTCTGTT | CCATCCCGTCTGGGA | CGGGCCGGTCTCCAG |
| TACTAAGAAAAATTC | GGGACCTCTGCCTAG | AAGAAAGAGAGATCA |
| GGTTTTCGTATTTTT | CCCATCGTCTGGGAT | CTAGGAAAACCAGAG |
| AGGAAGTGAGGAGCG | CTGATGCCGAGCCAA | CGCCGCCCCGTCTGG |
| CAGTCTGGGAAGTGA | AGTGATCCGCCAGCC | CCCTCTGCCTGGCTG |
| ACATGGGAGACTTCA | TCTCTCCACTATTAT | GGGGCGCCTCTGCCC |
| CACCACTCCCTAATC | GCCATCCCATCTAGG | TGTTCACTTGTTTAT |
| TCGCTACAACCACCT | TTTCGCTGTGTTGGC | CTTCCCTCCACTATT |
| GTCATCACCACTCCC | CCGCCGCCCCGTCTG | ACTAAAAAAAAAAAA |
| TGGACTGTACTGCTG | GTTTTTGTATTTTTG | AATGGATTAAGGGCG |
| GGCCTCCCAAAGAGC | TGTAGAAAGAAGTAG | CTCCCTGCCTGATTC |
| TTCGCTGTGTTGACC | CCGCCACGCCTGACT | GATGCTGTTAATCTA |
| TCGTTAAGAGTCATC | TGCCCAACAGCTCAT | GAAAGGCGGGAAAGG |
| GAAAAGAAAGAGAGA | GATGCCGAGCCGAAG | ACCCCGTCTGGGAAG |
| GGATGGGCCATGATG | TAAGATTGCAGCCTC | CTGGCCTCGAGTGAT |
| CCGAGCCAAAGCTGG | TCGCTACAACCTCCA | CGCCGTGTTGGCCGG |
| CCTCTCCCTGTCCCC | GTTTTTGTATTTTTT | CCCAGCGGCTCATTG |
| TTTGTTCACATGTTT | ATCCTGTTGATCTGT | GTGCTAAGATTGCAG |
| GGCCGCCCCTACTGG | GCCGAGATTGCAGCC | AGGGACACAAACACT |
| CTGCCGAGTGCCTGC | TCAGTGCTCAATGGT | ATGCTCGTTAAGAGT |
| GGCCAGGATGACAAT | ACCCTGCCAAATCCC | AGGTGTGCCCAACAG |
| ACGGGGTTTCGCTGT | TCCACTATTGTCCCA | TTTTGTCGAAAAGAA |
| CATGACCCTGCCAAA | GGACTGTACTGCTGC | CGGCCGCCCAGTCTG |
| GTGAGAAACACCCAA | TGTGTGGATAGAAGT | CTCTGATGCCGAGCC |
| CCTGTGCTCTCTGAA | TCTGGGAGGTGTACC | CCTTGGGATGCTGTT |
| AGTAATCAGGGACAC | TCATTGAGAACGGGC | CTCCCTAATCTTAAG |
| CCAACCCTGTGCTCT | GATGACGATGGCGGT | ATCCCCCTCTCCGAG |
| TGAGAAATCGGATGG | CCTGGGATTGCAGGC | GCCTGGCCGCCCAGT |
| CCACTCCCTAATCTT | ACGGAGTCTCGTTCA | TTGAGAAATCGGATG |
| TGCTTTGTTAAACAG | GCAGGCGCGCGCCGC | AGAAAGAAGTAGACA |
| TCAATGTTGCCCAGG | GAGCGCCTCTTCCCG | GCCCGGCCGCCACCC |
| CCCCTCTCTCCACGG | CCTCTGCCCGGCCAG | CCCGAGGTGCTGGGA |
| CCTCTCATGCGGAGC | CCAGCCGCCTGCCTT | GGGGGGCGCCTCTGC |
| TGGCCTCGAGTGATC | GGAGGTGTGCCCAAC | GTGGATAGAAGTAGA |
| CAACCCCGTGCTCTC | AAGAAAAATTCTTCT | CCGGCCGCCCATCGT |
| CCACTCCCTAATCTC | TACCCCCAACCCCGT | TCTCAAGTACCCAGG |
| AATAAATACTAAAAA | TTGCAGACGGAGTCT | TTTCGTTTTTTTTTG |
| CGTGCTCTCTGAAAC | GACCTTCTCTCCACT | GTTTCGCCGTGTTGG |
| GCCCCGTCTGGGAGG | ACCACCTCCCAGCCG | CGGCTCGCTGCAACC |
| ATGACCCTGCCAAAT | TCTCCCCTCTTTCCA | CCGTGCTCTCTGAAA |
| TGAGGAGCGCCTCTG | CGTCTAGGAAGTGAG | GCCTGACTGGTTTTG |
| GAGGTGAGGGGCGCC | GCGGTTTTGTGGAAT | GCCTGACTGGTTTTC |
| AATCAGGGACACAAA | CCTGACTGGTTTTCG | GTTAAACAGATGCTT |
| TGAGGAGCGCCTCTT | CCCCGTCTGGGAAGT | GGAGACTCCATTTTG |
| CTGGGATTGCAGACG | TACTGCCGTGATCTC | GCCGGGCTGGTCTCC |
| GCCCATCGTCTGAGA | CGAATAGAAAAGGGG | GCCTGACTGGTTTTT |
| TGCCTAGGAAAACCA | GGGAGACTTTTCATT | AGAAAGGGGGGAAAG |
| CCCATCTAGGAAGTG | TGCCCGGCCGCCACC | GGATGCTGTTAATCT |
| GAAGGCCGCAGGGTC | ATGGATTAAGGGCGG | TCCAGTGATTCTCCT |
| GGATTGCAGGCGCGC | TACGGTCTCCCTCTG | GAAGTAGACATGGGA |
| CAATAAAAAAAAAAA | CCCGCCCGGCCAGCC | TTCGTTTTTTTTTGG |
| GCTGGAGTGCAGTGG | GGAGACTTCATTTTG | CCCCGTCTGGGATGT |
| GCCCGGCCGCCCCTT | TCTACGGTCTCCCTC | TACTGCTGCCATCTC |
| GGCTCATTGGGGATG | ATTCTCCTGCCTCAG | AGGTGGGGGGGTCAG |
| TGCCGCCATCTCGGC | CGGCCGCCCATCGTC | GATTGCAGACGGAGT |
| AGAGGTAGACATGGG | AGCTGGACTGTACTG | CAGGATGACAATGGC |
| GGCGGCTTTGTGGAA | CCACTATTGTCCTAT | ACTATTGTCCCATGA |
| CAGCTCCTGGCCTCG | ATGCTGTTAATCTAT | AGCTCCTAACCGCGA |
| TCGTATTTTTTTGGT | GCCTCAGCCTGCCGA | CGATTGCAGGCACGC |
| GTGCCTGCGATTGCA | GGGGTTTCGCTGTGT | TCCCTCTCCCCTCTC |
| GAAATCGGATTGTTG | ACCACCCCGTCTGGG | CCATTGAGAACGGGC |
| AATGGCGGCTTTGTG | TCTGCCTAGGAAAAC | GTTCACGTGTTTATC |
| GAAAGGGGGGAAAGG | CGGTTTTGTGGAATA | TCCCTCTCCCCTCTT |
| GCCGAGCCGAGGCTG | GACGGAGTCTCGCTC | GACTGTACTGCCGTG |
| CACTCCCTAATCTCA | CCGCCATCCCGTCTA | ATCCTATGACCCTGC |
| TTGCCGAGGCTGGAC | GAGCCGGATTGCAGC | TTGGGATCCTGTTGA |
| TGTCGAAAAGAAAAG | GCGGTGCAAGATGTG | TCGGCCTCCCGAGGT |
| CGCTGCAACCTCCCT | CATAGGAGACTCCAT | TGTCAACTCAGGGTT |
| GCCTGCGATTGCAGG | CCTCCACCTCCCAGC | CTTACCCCCAACCCT |
| GATAGAAGTAGACAT | AAAGAGCCGGATTGC | TGCTCGTTAAGAGTC |
| CCTGCCTTGGCCTCC | GAACGGGCCAGGATG | AGGGTGGGGAAAAAA |
| TCTCCAGCTCCTAAC | GGTGGGGGGGTCAGC | CTCAATGGTGCCCAG |
| GGCTCACTGCAACCT | GCCCCGTCTGGGATG | TTTCCACGGTCTCCC |
| ATAGAAAGGGGGGAA | CGAGGTGCCGGGATT | GCCGTGTCTGTGTAG |
| GGCCGCCATCCCATC | TCTGTGTGGATAGAA | GGATCCTGTTGATCT |
| TAATCAGGGACACAA | CTCGCTGCAACCTCC | TCCCTGCCTGATTCT |
| CGCTCACTCAGTGCT | GATTCTCCTGCCTCA | CTCCCTCTGTTGCCG |
| AGAAGTAGACATAGG | CTATTGTCCTATGAC | AGGAGCGCCTCTGCC |
| AATGGTGCCCAGGCT | CTCCACGGTCTCCCT | AGAAAGGCGGGAAGG |
| CCCAAGAATGATCAA | GCAGCATGCTCGTTA | GCCGCCCCGTCTGGG |
| TGTGAGAAACACCCA | TCCCTCTCCCTGTCC | CCGTCTGGGAGGTGG |
| CACTCAGTGCTCAAT | CTGTGCTCTCTGAAA | CCGTCTGGGAAGTGA |
| GTGCTGTGTCCACTC | CCGAGCCGAAGCTGG | GACGGGGTTTCGCTG |
| CCCTCTTTCCACGGT | ACTGTACTGCCGTGA | CAGTGCTCAATGGTG |
| TGCTGCCATCTCGGC | GAGTGCAGTGGCGTG | TCCTGACCGCGAGTG |
| GGGGTTTCGCCGTGT | TGAGAACGGGCCATG | CCTCCACTATTGTCC |
| CGGTTTTGTCGAATA | AGTGAGGAGCCCCTC | TGTCTGTGTAGAAAG |
| TGATGCCGAGCCGAG | CGGCTCATTGGGGAT | CTGTGTGGATAGAAG |
| TGATGCCGAGCCGAA | TGGTTTTGGTGGAGA | GGAGGTGGGGGGCGC |
| CTCAAGTAATCAGGG | CAAATCCCCCTCTGC | GCGATTGCAGGCACG |
| AAGCTGGACGGTACT | AGGGTCCTCTGCCTA | TTTGTTCTGTACTAA |
| CTGAAACATGTGCTG | CCCCTCTGCGAGAAA | GACTTTTCATTTTGT |
| AGCGACCATTGAGAA | AGTGATTCTCCTGCC | CCAGCTCCTAACCGC |
| CCCTCTGTGAGAAAC | CACCTCTGCCCCGCC | GCCGCCCCTACTGGG |
| ATCTCGGCTCGCTGC | TGTGCCCAGCGGCTC | TGGCCTCCCAAAGAG |
| CAGCATGCTCGTTAA | CACAAACACTGCGGA | GTCTGAGATGTGGGG |
| ATACTAAAAAAAAAA | CAAATCCCCCTCTGT | GAGGAGCGTCTCTGC |
| TGCCGAGATTGCAGC | TGACTGGTTTTGGTG | CTCTGTGAGAAACAC |
| ATCTATAACCTTACC | CCGAGGTGCTGGGAT | TTGAAGGCAGCATGC |
| GAGACTCCATTTTGT | TGCCTGATTCTCCTG | GAGCCGAGGCTGGAC |
| GCCTCGGCCTCCCGA | CCAGCTCCTGACCGC | CTCTGCGAGAAACAC |
| CCGCCCATCGTCTGA | GAGACCTTTGTTCAC | CCGAGATTGCAGCCT |
| GTCCGGGAGGAGGTG | CTGGGAGGTGGGGGG | GCCACCACCCCGTCT |
| TGCTCTCTGAAACAT | GGAGCGCCTCTGCCC | CCCGGCCGCCCCTTC |
| GGAGGTGTACCCAGC | ACACAAACACTGCGG | TGTCCCATGACCCTG |
| GGGATGCTGTTGATC | CAAGAATTATCAATA | AACCTCCCTGCCTGA |
| GAGCCGAAGCTGGAC | GCCGGATTGCAGCCT | TCTGTGACCTTATCC |
| TCTCCCCTCTTTCTA | ACGGAGTCTGGTTCA | CGGCCTCCCGAGGTG |
| GAGTGATCCGCCAGC | CAAGTACCCAGGGAC | ACAATGGCGGTTTTG |
| GGGAAAAGAAAGAGA | TTGCCCAGGCTGGAG | CGGAGTCTCGTTCAC |
| TCTGCCTTGGGATGC | CCGAGGCTGGACTGT | CCCGCCGCCCCGTCT |
| CATGATGACAATGGC | GGCTCCAGTGATTCT | GGAGCACCTCTGCCC |
| TCAGGGACACAAACA | CCTGACTGGTTTTTG | CTGGTTCACTCAGTG |
| GGCCATGATGACAAT | ATTATCCTATGACCC | TCTCTCCACGGTCTC |
| CAAGTAATCAGGGAC | GGTGTGCCCAACAGC | GAATAGAAAGGCGGG |
| GCGACCATTGAGAAC | CAGCTCATTGAGAAC | GTGAGGAGCGCCTCC |
| GGCCTCCCGAGGTGC | CAAAGAGCCGGATTG | CGCCACCCCGTCTGG |
| GAGCGTCTCTGCCTG | CTCTTTCCACGGTCT | CAACCTACACCTCCC |
| CTCCCTCTCATGCGG | GCCGCCTGCCTTGGC | CCCGTCTGGGAGGAG |
| TGTTGGCCGGGCTGG | CTGTCCCCTCTTTCC | CTCCACTATTGTCCC |
| CCCTCTCCCTCTCCC | GCCTCTGCCCGGCCG | GCTGCCCAGTCTGGG |
| AGGAGACTCCATTTT | ACTGGTTTTTGTATT | ACTGGGAAGTGAGGA |
| AGAAACACCCAAGAA | CCCAACCCTGTGCTC | GTGAGGAGCGCCTCT |
| GTGGGGGGCGCCTCT | TGTTCTGTACTAAGA | CTCCACTATTGTCCT |
| CCAGAGACCTTTGTT | CTGCCCGGCCAGCCG | TGTTGATCTGTGACC |
| GGTTTCGCTGTGTTG | CTTACCCCCAACCCC | TCCCTGCCTCGGGCT |
| GAGGTGTACCCAGCG | CCGGGAGGTGAGGGG | AAAAATTAAAAAAAA |
| TGGCGGCTTTGTGGA | AATAGAAAGGCGGGA | TAAGAGTCATCACCA |
| GCCCATCGTCTGGGA | CTGCCTTGGGATGCT | GAGACTTTTCATTTT |
| TGTGGGGAGCGCCTC | AGGAGCCCCTCTGCC | GACGGGGTTTCGCCG |
| CCGTCTGGGAGGAGG | ATGTGAGGAGCCCCT | ACATAGGAGACTCCA |
| TATCCCCAACCCTGT | CTGTTGATCTGTGAC | CCCCGTCCGGGAGGA |
| TGTACCCAGCGACCA | AGTCTCGTTCACTCA | GGGAGGTGTACCCAG |
| CTCCCTCTCCCTGTC | TCCCGAGGTGCCGGG | GAGTGCCTGGGATTG |
| CTCCTAACCGCGAGT | GTGGAGACGGGGTTT | CCCTCTCCCCTCTCT |
| TAATCTCAAGTACCC | TTTTGTCGAATAGAA | TGGGCCATGATGACA |
| CTCCCAAAGAGCCGG | GAATTATCAATAAAA | GCCGAGCCAAAGCTG |
| TGCCCGGCCACCACC | ATGGTTGCCGTGTCT | ATTATCAATAAAAAA |
| GCGGGAAAGGTGGGG | CTCTCTCCACGGTCT | GCGAGTGATCCGCCA |
| GGAGGTGAGGGGCGC | ACGGTACTGCTGCCA | GAAAGGTGGGGAAAA |
| ACCAGAGACCTTTGT | CACGGTCTCCCTCTG | CCCCGTCCGGGAGGT |
| GAGCCAAAGCTGGAC | GTGTTGGCCGGGCTG | GGACTGTACTGCCGT |
| GTGCTGTGTCAACTC | GTAGAAAGAAGTAGA | TCAACTCAGGGTTAA |
| AGCGTCTCTGCCTGG | TCTCCACGGTCTCCC | AAAACCAGAGACCTT |
| TGATCTCGGCTCGCT | CCATTTTGTTCTGTA | CCCGTCTGGGAAGTG |
| TGTTGCTGTGTCTGT | ACCCAAGAATGATCA | GAGAGATCAGATTGT |
| CCGGGTCTGTGTGGA | CTCTCCCTCTCCCCT | CCTCTCCGAGAAACA |
| CCGGATTGCAGCCTC | AGCCTCGGCCTCCCG | ACTGTGTCTGTGTAG |
| TTCTCTCCACTATTA | CATCGTCTGGGATGT | GGACTGTACTGCCGC |
| TTGTATTTTTGGTGG | CGGCCGCCCCGTCTG | GCTTGAAGGCAGCAT |
| CGATGGCGGTTTTGT | AAACACCCAAGAATG | TGAGGAGCGCCTCCG |
| TGTGACCTTACCCCC | TCCCATGACCCTGCC | TGCTAAGATTGCAGC |
| CCTGTCCCCTCTTTC | GCCGCCATCCCGTCT | TGAGGGGCGCCTCTG |
| CCTCTGTTGCCGAGG | TTCACGTGTTTATCT | TCCCTCTGATGCCGA |
| TTCACATGTTTATCT | ATCCCGTCTAGGAAG | TGAGAACGGGCCAGG |
| GGAATAGAAAGGCGG | GGCGGTTTTGTGGAA | TGCCGTGATCTCGGC |
| TTGGGATGCTGTTGA | TCATGCGGAGCCGAA | GAAACACCCAAGAAT |
| ATTGCAGCCTCTGCC | GTCAGCCCCCCGCCC | GCCTAGGAAAACCAG |
| GGTCCTCTGCCTAGG | TGGTTGCCGGGTCTG | CCAGTGATTCTCCTG |
| CGGTCTCCCTCTCAT | CTGCTGACCTTCTCT | CTGGTTTTCGTATTT |
| TGACCTTCTCTCCAC | GGCTCGCTACAACCA | CCATCGTCTGGGATG |
| ACTGCTGCCATCTCG | TGAGAAACACCCAAG | GAGGTAGACATGGGA |
| GGGGAAAAAATTGAG | GCACCTCTGCCCCGC | TAGACATAGGAGACT |
| GGCCTGCCGAGTGCC | TCTCGCTCACTCAGT | CTGGTTTTCGTTTTT |
| CCAGCCTCGGCCTCC | CCCGGCCGCCACCCC | AGACGGAGTCTGGTT |
| ATTGGGGATGGGCCA | AATCTCAAGTAATCA | ACCCTGTGCTCTCTG |
| GTTGGCCGGGCCGGT | GGCTCGCTACAACCT | TGGGAGACTTTTCAT |
| GTGCTCTCTGAAACA | AGGCACGCGCCGCCA | TCTCTGAAACATGTG |
| GATTGCAGGCACGCG | CTGTACTGCTGCCAT | GGTACTGCTGCCATC |
| TCGCTGTGTTGGCCG | GGCGGTGCAAGATGT | AAACATGTGCTGTGT |
| ACGGGCCATGATGAC | CTACTGGGAAGTGAG | GGAGCCCCTCTGCCC |
| TATCAATAAAAAAAA | GGGTTAAATGGATTA | AAATTGAGAAATCGG |
| CCATGATGACAATGG | CTCGGCTCACTGCAA | ACACCTCCCAGCCGC |
| TACTGCCGCCATCTC | TTTTCGTATTTTTTT | TGGTTGCCGTGTCTG |
| CGCCCAGTCTGGGAA | TTGTTCACTTGTTTA | CGAGCCAAAGCTGGA |
| TATCTGCTGACCTTC | CACCGCCCCGTCTGG | CGGAGCCGAAGCTGG |
| GCCCCTTCTGGGAAG | TGCCGAGCCAAAGCT | GCCCCTCTGCCTGGC |
| CTCATTGAGAACGGG | TCGCTCACTCAGTGC | GCCGGGATTGCAGAC |
| TATTGTCCCATGACC | CAATAAAAAAAATTA | GTCTCCCTCTGATGC |
| GCCGGGTCTGTGTGG | TCCCCTCTTTCTACG | GTAATCAGGGACACA |
| AGTGATCTGCCCGCC | ATGACCCTGCCACAT | GTGGGGAGCGCCTCT |
| GATGGTTGCCGGGTC | CCGCCACCCCGTCTG | GCGAGTGATCTGCCC |
| TTACCCCCAACCCCG | GGGCTGGTCTCCAGC | CCGTCTAGGAAGTGA |
| CGCCCCGTCCGGGAG | TGCCAAATCCCCCTC | GTTGCCGGGTCTGTG |
| CCACCCCGTCTGGGA | ACTCCCTAATCTCAA | GAGAACGGGCCATGA |
| TGGGAGGTGGGGGGG | CGCCCATCGTCTGAG | GTTGATCTGTGACCT |
| GTCTCCAGCTCCTAA | | |
| AAGATTGCAGCCTCT | | |
| GTGCCGGGATTGCAG | | |
| ATAACCTTACCCCCA | | |
| GTTAAGAGTCATCAC | | |
| GAAGTGAGGAGCCCC | | |
| GTGTCTGTGTAGAAA | | |
| GGGGAGCGCCTCTGC | | |
| TTGACCGGGCTGGTC | | |
| GGTGGGGAAAAAATT | | |
| GTCCGGGAGGTGGGG | | |
| GGGGGCGCCTCTGCC | | |
| CGCTACAACCTCCAC | | |
| GGGGAAAAGATAGAG | | |
| AACACCCAAGAATGA | | |
| CTGTTAATCTATAAC | | |
| TGTGTTGACCGGGCT | | |
| ACCGCGAGTGATCTG | | |
| TGGGGGGGTCAGCCC | | |
| TCCCAAAGTGCTAAG | | |
| CTCAGGGTTAAATGG | | |
| TGGCCGGGCCGGTCT | | |
| TCCTGCCTCAGCCTG | | |
| GTCTCTGCCTGGCCG | | |
| TCACTGCAACCTCCC | | |
| GGAGCCCCTCTGCCT | | |

[0021] AONS targeting an ALU present in a mammalian genome can be generated using no more than routine methods.

[0022] By “agent” is meant a peptide, nucleic acid molecule, or small compound. In one embodiment, the agent is an inhibitory nucleic acid molecule, such as an antisense oligonucleotide.

[0023] By “ameliorate” is meant decrease, suppress, attenuate, diminish, arrest, or stabilize the development or progression of a disease. In one embodiment, the disease affects the central nervous system and is associated with the insertion of a transposable element into a mammalian genome.

[0024] By “alteration” is meant a change (increase or decrease) in the sequence, expression levels or activity of a gene or polypeptide as detected by standard art known methods such as those described herein. As used herein, an alteration includes a 10% change in expression levels, preferably a 25% change, more preferably a 40% change, and most preferably a 50% or greater change in expression levels.”

[0025] By “analog” is meant a molecule that is not identical, but has analogous functional or structural features. For example, a polypeptide analog retains the biological activity of a corresponding naturally-occurring polypeptide, while having certain biochemical modifications that enhance the analog's function relative to a naturally occurring polypeptide. Such biochemical modifications could increase the analog's protease resistance, membrane permeability, or half-life, without altering, for example, ligand binding. An analog may include an unnatural amino acid.

[0026] In this disclosure, “comprises,” “comprising,” “containing” and “having” and the like can have the meaning ascribed to them in U.S. Patent law and can mean “ includes,” “including,” and the like; “consisting essentially of” or “consists essentially” likewise has the meaning ascribed in U.S. Patent law and the term is open-ended, allowing for the presence of more than that which is recited so long as basic or novel characteristics of that which is recited is not changed by the presence of more than that which is recited, but excludes prior art embodiments.

[0027] “Detect” refers to identifying the presence, absence or amount of the analyte to be detected.

[0028] By “detectable label” is meant a composition that when linked to a molecule of interest renders the latter detectable, via spectroscopic, photochemical, biochemical, immunochemical, or chemical means. For example, useful labels include radioactive isotopes, magnetic beads, metallic beads, colloidal particles, fluorescent dyes, electron-dense reagents, enzymes (for example, as commonly used in an ELISA), biotin, digoxigenin, or haptens.

[0029] By “disease” is meant any condition or disorder that damages or interferes with the normal function of a cell, tissue, or organ. Examples of diseases include Batten disease or any genetic disorder associated with a heterozygous mutation in a first allele of a gene and the insertion of a transposable element affecting a second allele of the gene.

[0030] By “effective amount” is meant the amount of an agent of the invention required to ameliorate the symptoms of a disease relative to an untreated patient. The effective amount of active compound(s) used to practice the present invention for therapeutic treatment of a disease varies depending upon the manner of administration, the age, body weight, and general health of the subject. Ultimately, the attending physician or veterinarian will decide the appropriate amount and dosage regimen. Such amount is referred to as an “effective” amount.

[0031] The invention provides a number of targets that are useful for the development of highly specific drugs to treat or a disorder characterized by the methods delineated herein. In addition, the methods of the invention provide a facile means to identify therapies that are safe for use in subjects. In addition, the methods of the invention provide a route for analyzing virtually any number of compounds for effects on a disease described herein with high-volume throughput, high sensitivity, and low complexity.

[0032] By “fragment” is meant a portion of a polypeptide or nucleic acid molecule. This portion contains, preferably, at least 10%, 20%, 30%, 40%, 50%, 60%, 70%, 80%, or 90% of the entire length of the reference nucleic acid molecule or polypeptide. A fragment may contain 10, 20, 30, 40, 50, 60, 70, 80, 90, or 100, 200, 300, 400, 500, 600, 700, 800, 900, or 1000 nucleotides or amino acids.

[0033] “Hybridization” means hydrogen bonding, which may be Watson-Crick, Hoogsteen or reversed Hoogsteen hydrogen bonding, between complementary nucleobases. For example, adenine and thymine are complementary nucleobases that pair through the formation of hydrogen bonds.

[0034] By “inhibitory nucleic acid” is meant a double-stranded RNA, siRNA, shRNA, or antisense RNA, or a portion thereof, or a mimetic thereof, that when administered to a mammalian cell results in a decrease (e.g., by 10%, 25%, 50%, 75%, or even 90-100%) in the expression of a target gene. Typically, a nucleic acid inhibitor comprises at least a portion of a target nucleic acid molecule, or an ortholog thereof, or comprises at least a portion of the complementary strand of a target nucleic acid molecule. For example, an inhibitory nucleic acid molecule comprises at least a portion of any or all of the nucleic acids delineated herein. In one embodiment, an antisense RNA comprises at least about 5, 10, 11, 12, 13, 14, 15, 16, 17, 18, 19, 20, 21, 22, 23, 24, 25, 26, 27, 28, 29, 30, 35 or more nucleobases complementary to a target sequence. In one embodiment, the oligonucleotide comprises 18-22 nucleobases.

[0035] The terms “isolated,” “purified,” or “biologically pure” refer to material that is free to varying degrees from components which normally accompany it as found in its native state. “Isolate” denotes a degree of separation from original source or surroundings. “Purify” denotes a degree of separation that is higher than isolation. A “purified” or “biologically pure” protein is sufficiently free of other materials such that any impurities do not materially affect the biological properties of the protein or cause other adverse consequences. That is, a nucleic acid or peptide of this invention is purified if it is substantially free of cellular material, viral material, or culture medium when produced by recombinant DNA techniques, or chemical precursors or other chemicals when chemically synthesized. Purity and homogeneity are typically determined using analytical chemistry techniques, for example, polyacrylamide gel electrophoresis or high performance liquid chromatography. The term “purified” can denote that a nucleic acid or protein gives rise to essentially one band in an electrophoretic gel. For a protein that can be subjected to modifications, for example, phosphorylation or glycosylation, different modifications may give rise to different isolated proteins, which can be separately purified.

[0036] By “isolated polynucleotide” is meant a nucleic acid (e.g., a DNA) that is free of the genes which, in the naturally-occurring genome of the organism from which the nucleic acid molecule of the invention is derived, flank the gene. The term therefore includes, for example, a recombinant DNA that is incorporated into a vector; into an autonomously replicating plasmid or virus; or into the genomic DNA of a prokaryote or eukaryote; or that exists as a separate molecule (for example, a cDNA or a genomic or cDNA fragment produced by PCR or restriction endonuclease digestion) independent of other sequences. In addition, the term includes an RNA molecule that is transcribed from a DNA molecule, as well as a recombinant DNA that is part of a hybrid gene encoding additional polypeptide sequence.

[0037] By an “isolated polypeptide” is meant a polypeptide of the invention that has been separated from components that naturally accompany it. Typically, the polypeptide is isolated when it is at least 60%, by weight, free from the proteins and naturally-occurring organic molecules with which it is naturally associated. Preferably, the preparation is at least 75%, more preferably at least 90%, and most preferably at least 99%, by weight, a polypeptide of the invention. An isolated polypeptide of the invention may be obtained, for example, by extraction from a natural source, by expression of a recombinant nucleic acid encoding such a polypeptide; or by chemically synthesizing the protein. Purity can be measured by any appropriate method, for example, column chromatography, polyacrylamide gel electrophoresis, or by HPLC analysis.

[0038] By “marker” is meant any protein or polynucleotide having an alteration in expression level or activity that is associated with a disease or disorder.

[0039] As used herein, “obtaining” as in “obtaining an agent” includes synthesizing, purchasing, or otherwise acquiring the agent.

[0040] “Anti-sense oligonucleotide set” means a number of oligonucleotides that may be used, for example, in a therapeutic composition. A set of anti-sense oligonucleotide set would comprise at least 2, 3, 4, 5, 6, 7, 8, 9, 10, 11, 12, 13, 14, 15, 16, 18, 20, 30, 40, 50, 60, 80, 100, 200, 250, 300, 400, 500, 600, 700, 800, 900, 1000, 1500, 2000, or more AONs.

[0041] By “reduces” is meant a negative alteration of at least 10%, 25%, 50%, 75%, or 100%.

[0042] By “reference” is meant a standard or control condition.

[0043] A “reference sequence” is a defined sequence used as a basis for sequence comparison. A reference sequence may be a subset of or the entirety of a specified sequence; for example, a segment of a full-length cDNA or gene sequence, or the complete cDNA or gene sequence. For polypeptides, the length of the reference polypeptide sequence will generally be at least about 10, 15 or 16 amino acids, at least about 20 amino acids, more preferably at least about 25 amino acids, and even more about 35 amino acids, about 50 amino acids, or about 100 amino acids. For nucleic acids, the length of the reference nucleic acid sequence will generally be at least about 5, 10, 15, 20, or 50 nucleotides, at least about 60 nucleotides, more preferably at least about 75 nucleotides, and even more preferably about 100 nucleotides or about 300 nucleotides or any integer thereabout or therebetween.

[0044] By “siRNA” is meant a double stranded RNA. Optimally, an siRNA is 18, 19, 20, 21, 22, 23 or 24 nucleotides in length and has a 2 base overhang at its 3′ end. These dsRNAs can be introduced to an individual cell or to a whole animal; for example, they may be introduced systemically via the bloodstream. Such siRNAs are used to downregulate mRNA levels or promoter activity.

[0045] By “specifically binds” is meant a polynucleotide that recognizes and binds a complementary sequence of the invention, but which does not substantially recognize and bind other molecules in a sample, for example, a biological sample, which naturally includes other polynucleotide sequences. An antisense oligonucleotide may specifically bind its perfect complement or a sequence to which it is not perfectly complementary. In one embodiment, the antisense oligonucleotide specifically binds a polynucleotide that comprises 1, 2, 3, 4, 5 or more bases that are not perfectly complementary to the anti-sense oligonucleotide.

[0046] Nucleic acid molecules useful in the methods of the invention include any nucleic acid molecule that encodes a polypeptide of the invention or a fragment thereof. Such nucleic acid molecules need not be 100% identical with an endogenous nucleic acid sequence, but will typically exhibit substantial identity. Polynucleotides having “substantial identity” to an endogenous sequence are typically capable of hybridizing with at least one strand of a double-stranded nucleic acid molecule. Nucleic acid molecules useful in the methods of the invention include any nucleic acid molecule that encodes a polypeptide of the invention or a fragment thereof. Such nucleic acid molecules need not be 100% identical with an endogenous nucleic acid sequence, but will typically exhibit substantial identity. Polynucleotides having “substantial identity” to an endogenous sequence are typically capable of hybridizing with at least one strand of a double-stranded nucleic acid molecule. By “hybridize” is meant pair to form a double-stranded molecule between complementary polynucleotide sequences (e.g., a gene described herein), or portions thereof, under various conditions of stringency. (See, e.g., Wahl, G. M. and S. L. Berger (1987) Methods Enzymol. 152:399; Kimmel, A. R. (1987) Methods Enzymol. 152:507).

[0047] For example, stringent salt concentration will ordinarily be less than about 750 mM NaCl and 75 mM trisodium citrate, preferably less than about 500 mM NaCl and 50 mM trisodium citrate, and more preferably less than about 250 mM NaCl and 25 mM trisodium citrate. Low stringency hybridization can be obtained in the absence of organic solvent, e.g., formamide, while high stringency hybridization can be obtained in the presence of at least about 35% formamide, and more preferably at least about 50% formamide. Stringent temperature conditions will ordinarily include temperatures of at least about 30° C., more preferably of at least about 37° C., and most preferably of at least about 42° C. Varying additional parameters, such as hybridization time, the concentration of detergent, e.g., sodium dodecyl sulfate (SDS), and the inclusion or exclusion of carrier DNA, are well known to those skilled in the art. Various levels of stringency are accomplished by combining these various conditions as needed. In a preferred: embodiment, hybridization will occur at 30° C. in 750 mM NaCl, 75 mM trisodium citrate, and 1% SDS. In a more preferred embodiment, hybridization will occur at 37° C. in 500 mM NaCl, 50 mM trisodium citrate, 1% SDS, 35% formamide, and 100 .mu·g/ml denatured salmon sperm DNA (ssDNA). In a most preferred embodiment, hybridization will occur at 42° C. in 250 mM NaCl, 25 mM trisodium citrate, 1% SDS, 50% formamide, and 200 μg/ml ssDNA. Useful variations on these conditions will be readily apparent to those skilled in the art.

[0048] For most applications, washing steps that follow hybridization will also vary in stringency. Wash stringency conditions can be defined by salt concentration and by temperature. As above, wash stringency can be increased by decreasing salt concentration or by increasing temperature. For example, stringent salt concentration for the wash steps will preferably be less than about 30 mM NaCl and 3 mM trisodium citrate, and most preferably less than about 15 mM NaCl and 1.5 mM trisodium citrate. Stringent temperature conditions for the wash steps will ordinarily include a temperature of at least about 25° C., more preferably of at least about 42° C., and even more preferably of at least about 68° C. In a preferred embodiment, wash steps will occur at 25° C. in 30 mM NaCl, 3 mM trisodium citrate, and 0.1% SDS. In a more preferred embodiment, wash steps will occur at 42 C in 15 mM NaCl, 1.5 mM trisodium citrate, and 0.1% SDS. In a more preferred embodiment, wash steps will occur at 68° C. in 15 mM NaCl, 1.5 mM trisodium citrate, and 0.1% SDS. Additional variations on these conditions will be readily apparent to those skilled in the art. Hybridization techniques are well known to those skilled in the art and are described, for example, in Benton and Davis (Science 196:180, 1977); Grunstein and Hogness (Proc. Natl. Acad. Sci., USA 72:3961, 1975); Ausubel et al. (Current Protocols in Molecular Biology, Wiley Interscience, New York, 2001); Berger and Kimmel (Guide to Molecular Cloning Techniques, 1987, Academic Press, New York); and Sambrook et al., Molecular Cloning: A Laboratory Manual, Cold Spring Harbor Laboratory Press, New York.

[0049] By “substantially identical” is meant a polypeptide or nucleic acid molecule exhibiting at least 50% identity to a reference amino acid sequence (for example, any one of the amino acid sequences described herein) or nucleic acid sequence (for example, any one of the nucleic acid sequences described herein). Preferably, such a sequence is at least 60%, more preferably 80% or 85%, and more preferably 90%, 95% or even 99% identical at the amino acid level or nucleic acid to the sequence used for comparison.

[0050] Sequence identity is typically measured using sequence analysis software (for example, Sequence Analysis Software Package of the Genetics Computer Group, University of Wisconsin Biotechnology Center, 1710 University Avenue, Madison, Wis. 53705, BLAST, BESTFIT, GAP, or PILEUP/PRETTYBOX programs). Such software matches identical or similar sequences by assigning degrees of homology to various substitutions, deletions, and/or other modifications. Conservative substitutions typically include substitutions within the following groups: glycine, alanine; valine, isoleucine, leucine; aspartic acid, glutamic acid, asparagine, glutamine; serine, threonine; lysine, arginine; and phenylalanine, tyrosine. In an exemplary approach to determining the degree of identity, a

[0051] BLAST program may be used, with a probability score between e⁻³ and e⁻¹⁰⁰ indicating a closely related sequence.

[0052] By “subject” is meant a mammal, including, but not limited to, a human or non-human mammal, such as a bovine, equine, canine, ovine, or feline.

[0053] Ranges provided herein are understood to be shorthand for all of the values within the range. For example, a range of 1 to 50 is understood to include any number, combination of numbers, or sub-range from the group consisting 1, 2, 3, 4, 5, 6, 7, 8, 9, 10, 11, 12, 13, 14, 15, 16, 17, 18, 19, 20, 21, 22, 23, 24, 25, 26, 27, 28, 29, 30, 31, 32, 33, 34, 35, 36, 37, 38, 39, 40, 41, 42, 43, 44, 45, 46, 47, 48, 49, or 50.

[0054] As used herein, the terms “treat,” treating,” “treatment,” and the like refer to reducing or ameliorating a disorder and/or symptoms associated therewith. It will be appreciated that, although not precluded, treating a disorder or condition does not require that the disorder, condition or symptoms associated therewith be completely eliminated.

[0055] Unless specifically stated or obvious from context, as used herein, the term “or” is understood to be inclusive. Unless specifically stated or obvious from context, as used herein, the terms “a”, “an”, and “the” are understood to be singular or plural.

[0056] Unless specifically stated or obvious from context, as used herein, the term “about” is understood as within a range of normal tolerance in the art, for example within 2 standard deviations of the mean. About can be understood as within 10%, 9%, 8%, 7%, 6%, 5%, 4%, 3%, 2%, 1%, 0.5%, 0.1%, 0.05%, or 0.01% of the stated value. Unless otherwise clear from context, all numerical values provided herein are modified by the term about.

[0057] The recitation of a listing of chemical groups in any definition of a variable herein includes definitions of that variable as any single group or combination of listed groups. The recitation of an embodiment for a variable or aspect herein includes that embodiment as any single embodiment or in combination with any other embodiments or portions thereof.

[0058] Any compositions or methods provided herein can be combined with one or more of any of the other compositions and methods provided herein.

### BRIEF DESCRIPTION OF THE DRAWINGS

[0059] FIG. 1 is a schematic diagram showing the normal intron exon structure of the MFSD8 gene, and the position of the SVA insertion in the proband's MFSD8 gene. MFSD8 is also referred to as CLN7.

[0060] FIG. 2 is a schematic diagram showing the splicing of native MFSD8 and the MFSD8 gene truncation resulting from the introduction of a stop codon in a cryptic exon associated with insertion of the SVA transposon.

[0061] FIG. 3 is a schematic diagram showing the strategy for use of an exon skipping drug to block a splice acceptor site and restore normal gene splicing.

[0062] FIG. 4 is a schematic diagram showing the strategy for use of antisense oligonucleotides to restore normal gene splicing in the proband's MFSD8 gene.

[0063] FIG. 5A is a schematic diagram showing a comparative examination of WGS read alignments reveals a cluster of chimeric reads in the subject and mother, which is characteristic of retrotransposon insertion. Integrative Genomics Viewer (IGV) image showing WGS read alignments in the ˜52 kb region of chromosome 4 with CLN7/MFSD8 gene (top panel). Blow-up image of the ˜280 bp region (bottom panel), where two groups of chimeric reads were found: one group with a stretch of T bases on one end, another group with hexameric repeats on the other end. The two groups of chimeric reads shared a common 14 bp region that aligns well to the reference genome; this region corresponds to the duplicated retrotransposon target/entry site, often called “target site duplication.”

[0064] FIG. 5B is a schematic of chimeric sequence reads showing CLN7 intron 6 fused to polyT sequences.

[0065] FIG. 5C is a schematic of chimeric sequence reads showing CLN7 intron 6 fused to tandem GGGAGA repeats.

[0066] FIG. 5D is a schematic depicting identification of the insertion of the SVA transposon in CLN7 intron 6 of the patient.

[0067] FIG. 5E provides schematic diagrams of transposons.

[0068] FIG. 5F provides a schematic illustrating how chimeric reads derived from the subject would align on the reference genome. As the SVA transposon is inserted in the minus strand of the subject's genome (i.e. the sense strand of CLN7/MFSD8), WGS reads from the boundaries of the insertion will only partially align to the reference genome with the “soft-clipped” overhang of either polyT or hexameric repeat sequences.

[0069] FIG. 5G is a diagram showing the results of Sanger sequencing and CLIA-based genome analyses, which confirm the SVA retrotransposon insertion in the subject and mother's genome. The insertion was not observed in the father and brother's genomes. The location, length, and context of the SVA insertion in the subject and mother's CLN7/MFSD8 allele are displayed in the sense direction (minus strand of the reference genome). Also shown are the locations of Sanger sequencing primers used to sequence and assemble the full retrotransposon consensus sequence.

[0070] FIG. 5H is a diagram showing the CLN7/MFSD8 mutation status of the four members of the subject's family, which was confirmed by CLIA-based genome analysis.

[0071] FIG. 5I depicts results of RNA-seq and RT-PCR analyses, which showed that the SVA retrotransposon insertion causes exon trapping and resulting premature translational termination. Exon trapping and premature translational termination of CLN7/MFSD8 by the SVA retrotransposon insertion, was revealed by the blood RNA-seq analysis of the subject's four family members.

[0072] FIG. 5J shows RT-PCR confirmation of the exon trapping by SVA retrotransposon in the subject and mother.

[0073] FIG. 6A-6C shows that antisense oligonucleotide screening identified TY777, which effectively rescues exon trapping.

[0074] FIG. 6A shows the location and chemistry of antisense oligonucleotides that were designed to block the splice acceptor site or exonic splice enhancer (ESE) elements. The ESE elements were predicted by RESCUE-ESE and ESE-finder.

[0075] FIG. 6B is a graph showing fold change in the ratio of the normal exon6-exon7 splicing to the abnormal exon6-i6 splicing in response to antisense oligonucleotide transfection, measured by multiplex RT-PCR followed by gel electrophoresis band quantitation. Asterisks indicate statistically significant (P<0.05) difference from the no transfection (“Cell”) control.

[0076] FIG. 6C shows an example gel image used to obtain the results for panel B. “Ratio” indicates the ratio of the normal exon6-exon7 splicing to the abnormal exon6-i6 splicing, measured by gel band quantitation.

[0077] FIG. 7 is a schematic showing the locations where antisense oligonucleotides target the splice acceptor and a downstream site.

[0078] FIGS. 8A and 8B provide graphs depicting the results of a blind experiment conducted by an independent GLP-like laboratory, which confirmed the efficacy of TY777. FIG. 8A shows the ratio of the normal exon6-exon7 splicing to the abnormal exon6-i6 splicing in response to antisense oligonucleotide transfection into the subject -derived fibroblast, measured by multiplex qRT-PCR. FIG. 8B is the same as FIG. 8A, but for the subject—derived lymphoblasts.

[0079] FIG. 9 shows the structural formula of the drug, which is a 22 nucleotide 2′-O-methoxyethyl modified antisense oligonucleotide with complete phosphorothioate backbone.

[0080] FIG. 10 is a graph depicting results of a quantitative RT-PCR experiments showing milasen/TY777 is effective at nanomolar concentration.

[0081] FIG. 11 is a diagram showing that RNA-seq analysis confirms the splice-correcting effect of milasen/TY777. Chi-Square Test of Independence was used for assessing statistical significance.

[0082] FIG. 12 is a table that provides a genomic alignment analysis showing that milasen/TY777 has less predicted off-targets than nusinersen. All possible subsequences of a given length were taken from the milasen/TY777 sequence and aligned to the reference human genome by using BLAST. The number and identity of the off-target matches are shown.

[0083] FIG. 13 includes lysosomal function assays showing that the subject-derived fibroblasts have abnormal lysosomal function and milasen/TY777 effectively restores the dysfunction. FIG. 13A provides readouts of lysosomal function assays, reflecting healthy (top) and diseased (bottom) cellular states. FIGS. 13B, FIG. 13C, FIG. 13D, FIG. 13E, and FIG. 13F are graphs showing differences in lysosomal function between the subject-derived fibroblast and CLN7/MFSD8 wild type fibroblast cells (BJ1). P values were calculated using one-sided Student's T test. FIG. 13G, FIG. 13H, FIG. 13I, FIG. 13J, and FIG. 13K graphically illustrate the differences in lysosomal function between the subject-derived fibroblasts treated with scrambled oligonucleotide (TY772) and with milasen/TY777.

[0084] FIG. 14A and FIG. 14B show Milasen concentration in cerebrospinal fluid (CSF) and plasma, respectively, at various time points.

[0085] FIG. 15 shows changes in daily seizure frequency in the subject over time.

[0086] FIG. 16 shows changes in seizure frequency over time.

[0087] FIG. 17 shows changes in the frequency of strong and mild seizures over time.

### DETAILED DESCRIPTION OF THE INVENTION

[0088] The invention features antisense oligonucleotides and methods of using such antisense oligonucleotide to correct the deleterious effects of transposable element insertion in a mammalian genome.

[0089] The invention is based, at least in part, on the discovery of a case of neuronal ceroid lipofuscinosis (NLS) secondary to a cryptic, mobile DNA element (retrotransposon) insertion. Retrotransposon insertions are missed by current clinical sequencing approaches (Sanger, panel, or whole exome sequencing), but can be detected by whole genome sequencing in concert with specialized algorithms that have been developed. Detecting these mutations is of critical importance because they cause disease by serving as “poison exons”-inducing mis-splicing of the normal gene product into the retrotransposon itself, leading to a truncated gene product. The invention provides exon skipping oligonucleotides that can block incorporation of retrotransposon-induced poison exons, thus restoring normal gene function. These oligonucleotides will be used to treat virtually any disease associated with retrotransposon insertion.

### Batten Disease Case Study

[0090] The impetus for developing oligonucleotides for the treatment of diseases associated with retrotransposon insertion was the identification of a child displaying symptoms of a progressive neurological decline, including worsening gait, language and behavioral regression, and severe loss of vision. Brain and spine MRI identified progressive cerebellar atrophy. Other clinical features include fingerprint inclusions in endothelial cells and sweat ducts. These findings are pathologically consistent with Neuronal Ceroid Lipofuscinosis (“NCL”) also termed Batten Disease, which is a rare, recessive disorder resulting in the progressive degeneration of the brain and retina. This degeneration results from the accumulation of ceroid lipofuscin in lysosomes. Symptoms of the disorder include blindness, seizures, and motor and cognitive decline.

[0091] Sequence analysis on a biological sample obtained from the child identified the presence of a heterozygous mutation in MFSD8, designated 1102G.C, which is predicted to result in an amino acid substitution (Asp368His). This variant is located at the last nucleotide of an exon and is predicted to result in defective splicing. This variation was associated in the homozygous condition with the presence of NCL. Because Batten disease is recessive, the presence of only a single mutation in an affected individual is entirely unexpected. It begs the question of where the second allele is? Whole genome sequencing was carried out on DNA obtained from the proband. This sequence was compared with sequences obtained from her parents and a sibling. Results of the whole genome sequencing identified the presence of a retrotransposon insertion into the proband's second allele of MFSD8, which introduced a cryptic exon including a stop codon that resulted in truncation of the MFSD8 protein.

[0092] The invention provides one or more antisense oligonucleotides (e.g., a set of antisense oligonucleotides) targeting a deleterious splice acceptor site associated with a retrotransposon insertion, and methods of using the antisense oligonucleotides for the treatment of diseases or disorders associated with a retrotransposon insertion.

### Retrotransposons

[0093] Retrotransposons make use of an RNA-mediated transposition process. Retroelements are subdivided into two major groups: those containing long-terminal repeats, LTR retroelements, and all others, lumped into the category of non-LTR retroelements. Non-LTR retrotransposons include autonomous and non-autonomous members. The autonomous long interspersed element-1 (LINE-1 or L1), and its non-autonomous partners, SVA and Alu are the only elements currently identified as having retrotranspositional activity in the human genome.

[0094] Human L1 is about 6 kb in length and encodes two open reading frames, ORF1 and ORF2 that are both required for L1 retrotransposition. SINE-VNTR-Alus (SVA) are non-autonomous retrotransposons that are associated with disease in humans. SVAs are evolutionarily young and presumably mobilized by the LINE-1 reverse transcriptase in trans. SVAs are currently active and may impact the host through a variety of mechanisms including insertional mutagenesis, exon shuffling, alternative splicing, and the generation of differentially methylated regions (DMR). Each domain of SVA is derived from either a retrotransposon or a repeat sequence. A canonical SVA is on average ˜2 kilobases (kb), but SVA insertions may range in size from 700-4000 basepairs (bp). SVA disease insertions are associated with exon-skipping, deletion of genomic DNA, and reduced or absent mRNA expression.

[0095] The present invention provides methods of treating disease and/or disorders or symptoms thereof associated with the insertion of a retrotransposon (e.g., SVA or Alu), which comprise administering a therapeutically effective amount of a pharmaceutical composition comprising an antisense oligonucleotide targeting a retrotransponson (e.g., SVA or Alu) herein to a subject (e.g., a mammal such as a human). Thus, one embodiment is a method of treating a subject suffering from or susceptible to a disease or disorder or symptom thereof associated with the insertion of a TE. The method includes the step of administering to the mammal a therapeutic amount of an amount of a compound herein sufficient to treat the disease or disorder or symptom thereof, under conditions such that the disease or disorder is treated.

[0096] The methods herein include administering to the subject (including a subject identified as in need of such treatment) an effective amount of an antisense oligonucleotide described herein, or a composition comprising such antisense oligonucleotides. Identifying a subject in need of such treatment can be in the judgment of a subject or a health care professional and can be subjective (e.g. opinion) or objective (e.g. measurable by a test or diagnostic method).

[0097] The therapeutic methods of the invention (which include prophylactic treatment) in general comprise administration of a therapeutically effective amount of the antisense oligonucleotides herein to a subject (e.g., animal, human) in need thereof, including a mammal, particularly a human. Such treatment will be suitably administered to subjects, particularly humans, suffering from, having, susceptible to, or at risk for a disease, disorder, or symptom thereof. Determination of those subjects “at risk” can be made by any objective or subjective determination by a diagnostic test or opinion of a subject or health care provider (e.g., genetic test, enzyme or protein marker, Marker (as defined herein), family history, and the like). The compounds herein may be also used in the treatment of any other disorders in which TEs may be implicated.

[0098] In one embodiment, the invention provides a method of monitoring treatment progress. The method includes the step of determining a level of diagnostic marker (Marker) (e.g., a protein whose expression or activity is disrupted by a TE) in a subject suffering from or susceptible to a disorder or symptoms thereof associated with TE insertion, in which the subject has been administered a therapeutic amount of an antisense oligonucleotide herein sufficient to treat the disease or symptoms thereof. The level, length or activity of the Marker determined in the method can be compared to the level, length or activity of the Marker in either healthy normal controls or in other afflicted patients to establish the subject's disease status. In preferred embodiments, a second level of Marker in the subject is determined at a time point later than the determination of the first level, and the two levels are compared to monitor the course of disease or the efficacy of the therapy. In certain preferred embodiments, a pre-treatment level of Marker in the subject is determined prior to beginning treatment according to this invention; this pre-treatment level of Marker can then be compared to the level of Marker in the subject after the treatment commences, to determine the efficacy of the treatment.

Oligonucleotides and other Nucleobase Oligomers

[0099] In one embodiment, an oligonucleotide or nucleobase oligomer of the invention comprises 2′-modified oligonucleotides where some or all internucleotide linkages are modified to phosphorothioates or phosphodiester (PO). The presence of methylphosphonate modifications increases the affinity of the oligonucleotide for its target RNA and thus reduces the IC50. This modification also increases the nuclease resistance of the modified oligonucleotide. It is understood that the methods and reagents of the present invention may be used in conjunction with any technologies that may be developed, including covalently-closed multiple antisense (CMAS) oligonucleotides (Moon et al., Biochem J. 346:295-303, 2000; PCT Publication No. WO 00/61595), ribbon-type antisense (RiAS) oligonucleotides (Moon et al., J. Biol. Chem. 275:4647-4653, 2000; PCT Publication No. WO 00/61595), and large circular antisense oligonucleotides (U.S. Patent Application Publication No. US 2002/0168631 A1).

[0100] As is known in the art, a nucleoside is a nucleobase-sugar combination. The base portion of the nucleoside is normally a heterocyclic base. The two most common classes of such heterocyclic bases are the purines and the pyrimidines. Nucleotides are nucleosides that further include a phosphate group covalently linked to the sugar portion of the nucleoside. For those nucleosides that include a pentofuranosyl sugar, the phosphate group can be linked to either the 2′, 3′ or 5′ hydroxyl moiety of the sugar. In forming oligonucleotides, the phosphate groups covalently link adjacent nucleosides to one another to form a linear polymeric compound. In turn, the respective ends of this linear polymeric structure can be further joined to form a circular structure; open linear structures are generally preferred. Within the oligonucleotide structure, the phosphate groups are commonly referred to as forming the backbone of the oligonucleotide. The normal linkage or backbone of RNA and DNA is a 3′ to 5′ phosphodiester linkage.

[0101] Specific examples of preferred nucleobase oligomers useful in this invention include oligonucleotides containing modified backbones or non-natural internucleoside linkages. As defined in this specification, nucleobase oligomers having modified backbones include those that retain a phosphorus atom in the backbone and those that do not have a phosphorus atom in the backbone. For the purposes of this specification, modified oligonucleotides that do not have a phosphorus atom in their internucleoside backbone are also considered to be nucleobase oligomers.

[0102] Nucleobase oligomers that have modified oligonucleotide backbones include, for example, phosphorothioates, chiral phosphorothioates, phosphorodithioates, phosphotriesters, aminoalkyl-phosphotriesters, methyl and other alkyl phosphonates including 3′-alkylene phosphonates and chiral phosphonates, phosphinates, phosphoramidates including 3′-amino phosphoramidate and aminoalkylphosphoramidates, thionophosphoramidates, thionoalkylphosphonates, thionoalkylphosphotriest-ers, and boranophosphates having normal 3′-5′ linkages, 2′-5′ linked analogs of these, and those having inverted polarity, wherein the adjacent pairs of nucleoside units are linked 3′-5′ to 5′-3′ or 2′-5′ to 5′-2′. Various salts, mixed salts and free acid forms are also included. Representative United States patents that teach the preparation of the above phosphorus-containing linkages include, but are not limited to, U.S. Pat. Nos. 3,687,808; 4,469,863; 4,476,301; 5,023,243; 5,177,196; 5,188,897; 5,264,423; 5,276,019; 5,278,302; 5,286,717; 5,321,131; 5,399,676; 5,405,939; 5,453,496; 5,455,233; 5,466,677; 5,476,925; 5,519,126; 5,536,821; 5,541,306; 5,550,111; 5,563,253; 5,571,799; 5,587,361; and 5,625,050, each of which is herein incorporated by reference.

[0103] Nucleobase oligomers having modified oligonucleotide backbones that do not include a phosphorus atom therein have backbones that are formed by short chain alkyl or cycloalkyl internucleoside linkages, mixed heteroatom and alkyl or cycloalkyl internucleoside linkages, or one or more short chain heteroatomic or heterocyclic internucleoside linkages. These include those having morpholino linkages (formed in part from the sugar portion of a nucleoside); siloxane backbones; sulfide, sulfoxide and sulfone backbones; formacetyl and thioformacetyl backbones; methylene formacetyl and thioformacetyl backbones; alkene containing backbones; sulfamate backbones; methyleneimino and methylenehydrazino backbones; sulfonate and sulfonamide backbones; amide backbones; and others having mixed N, O, S and CH2 component parts. Representative United States patents that teach the preparation of the above oligonucleotides include, but are not limited to, U.S. Pat. Nos. 5,034,506; 5,166,315; 5,185,444; 5,214,134; 5,216,141; 5,235,033; 5,264,562; 5,264,564; 5,405,938; 5,434,257; 5,466,677; 5,470,967; 5,489,677; 5,541,307; 5,561,225; 5,596,086; 5,602,240; 5,610,289; 5,602,240; 5,608,046; 5,610,289; 5,618,704; 5,623,070; 5,663,312; 5,633,360; 5,677,437; and 5,677,439, each of which is herein incorporated by reference.

[0104] In other nucleobase oligomers, both the sugar and the internucleoside linkage, i.e., the backbone, are replaced with novel groups. The nucleobase units are maintained for hybridization with a TE. One such nucleobase oligomer, is referred to as a Peptide Nucleic Acid (PNA). In PNA compounds, the sugar-backbone of an oligonucleotide is replaced with an amide containing backbone, in particular an aminoethylglycine backbone. The nucleobases are retained and are bound directly or indirectly to aza nitrogen atoms of the amide portion of the backbone. Methods for making and using these nucleobase oligomers are described, for example, in “Peptide Nucleic Acids: Protocols and Applications” Ed. P. E. Nielsen, Horizon Press, Norfolk, United Kingdom, 1999. Representative United States patents that teach the preparation of PNAs include, but are not limited to, U.S. Pat. Nos. 5,539,082; 5,714,331; and 5,719,262, each of which is herein incorporated by reference. Further teaching of PNA compounds can be found in Nielsen et al., Science, 1991, 254, 1497-1500.

[0105] In particular embodiments of the invention, the nucleobase oligomers have phosphorothioate backbones and nucleosides with heteroatom backbones, and in particular —CH₂—NH—O—CH₂—, —CH₂—N(CH₃)—O—CH2— (known as a methylene (methylimino) or MMI backbone), —CH₂—O—N(CH₃)—CH₂₋—, —CH₂—N(CH₃)—N(CH₃)—CH₂—, and —O—N(CH₃)—CH₂—CH₂—. In other embodiments, the oligonucleotides have morpholino backbone structures described in U.S. Pat. No. 5,034,506.

[0106] Nucleobase oligomers may also contain one or more substituted sugar moieties.

[0107] Nucleobase oligomers comprise one of the following at the 2′ position: OH; F; O—, S—, or N-alkyl; O—, S—, or N-alkenyl; O—, S— or N—alkynyl; or O-alkyl-O-alkyl, wherein the alkyl, alkenyl, and alkynyl may be substituted or unsubstituted C₁ to C₁₀ alkyl or C₂ to C₁₀ alkenyl and alkynyl. Particularly preferred are O[(CH₂)ₙO]ₙCH₃, O(CH₂)ₙOCH₃, O(CH₂)nNH2, O(CH₂)ₙCH₃, O(CH₂)ₙONH₂, and O(CH₂)ₙON[(CH₂)ₙCH₃)]₂, where n and m are from 1 to about 10. Other preferred nucleobase oligomers include one of the following at the 2′ position: C1 to C10 lower alkyl, substituted lower alkyl, alkaryl, aralkyl, O-alkaryl, or O-aralkyl, SH, SCH₃, OCN, Cl, Br, CN, CF₃, OCF₃, SOCH₃, SO₂CH₃, ONO₂, NO₂, NH₂, heterocycloalkyl, heterocycloalkaryl, aminoalkylamino, polyalkylamino, substituted silyl, an RNA cleaving group, a reporter group, an intercalator, a group for improving the pharmacokinetic properties of a nucleobase oligomer, or a group for improving the pharmacodynamic properties of an nucleobase oligomer, and other substituents having similar properties. Preferred modifications are 2′-O-methyl and 2′-methoxyethoxy (2′O—CH₂CH₂OCH₃, also known as 2′O-(2-methoxyethyl) or 2′-MOE). Another desirable modification is 2′-dimethylaminooxyethoxy (i.e., O(CH₂)₂ON(CH₃)₂) also known as 2′-DMAOE. Other modifications include, 2′-aminopropoxy (2′-OCH₂CH₂CH₂NH₂) and 2′-fluoro (2′-F). Similar modifications may also be made at other positions on an oligonucleotide or other nucleobase oligomer, particularly the 3′ position of the sugar on the 3′ terminal nucleotide or in 2′-5′ linked oligonucleotides and the 5′ position of 5′ terminal nucleotide. Nucleobase oligomers may also have sugar mimetics such as cyclobutyl moieties in place of the pentofuranosyl sugar. Representative U.S. patents that teach the preparation of such modified sugar structures include, but are not limited to, U.S. Pat. Nos. 4,981,957; 5,118,800; 5,319,080; 5,359,044; 5,393,878; 5,446,137; 5,466,786; 5,514,785; 5,519,134; 5,567,811; 5,576,427; 5,591,722; 5,597,909; 5,610,300; 5,627,053; 5,639,873; 5,646,265; 5,658,873; 5,670,633; and 5,700,920, each of which is herein incorporated by reference in its entirety.

[0108] Nucleobase oligomers may also include nucleobase modifications or substitutions. As used herein, “unmodified” or “natural” nucleobases include the purine bases adenine (A) and guanine (G), and the pyrimidine bases thymine (T), cytosine (C) and uracil (U). Modified nucleobases include other synthetic and natural nucleobases, such as 5-methylcytosine (5-me-C), 5-hydroxymethyl cytosine, xanthine, hypoxanthine, 2-aminoadenine, 6-methyl and other alkyl derivatives of adenine and guanine; 2-propyl and other alkyl derivatives of adenine and guanine; 2-thiouracil, 2-thiothymine and 2-thiocytosine; 5-halouracil and cytosine; 5-propynyl uracil and cytosine; 6-azo uracil, cytosine and thymine; 5-uracil (pseudouracil); 4-thiouracil; 8-halo, 8-amino, 8-thiol, 8-thioalkyl, 8-hydroxyl and other 8-substituted adenines and guanines; 5-halo (e.g., 5-bromo), 5-trifluoromethyl and other 5-substituted uracils and cytosines; 7-methylguanine and 7-methyladenine; 8-azaguanine and 8-azaadenine; 7-deazaguanine and 7-deazaadenine; and 3-deazaguanine and 3-deazaadenine. Further nucleobases include those disclosed in U.S. Pat. No. 3,687,808, those disclosed in The Concise Encyclopedia Of Polymer Science And Engineering, pages 858-859, Kroschwitz, J. I., ed. John Wiley & Sons, 1990, those disclosed by Englisch et al., Angewandte Chemie, International Edition, 1991, 30, 613, and those disclosed by Sanghvi, Y. S., Chapter 15, Antisense Research and Applications, pages 289-302, Crooke, S. T. and Lebleu, B., ed., CRC Press, 1993. Certain of these nucleobases are particularly useful for increasing the binding affinity of an antisense oligonucleotide of the invention. These include 5-substituted pyrimidines, 6-azapyrimidines, and N-2, N-6 and 0-6 substituted purines, including 2-aminopropyladenine, 5-propynyluracil and 5-propynylcytosine. 5-methylcytosine substitutions have been shown to increase nucleic acid duplex stability by 0.6-1.2.degree. C. (Sanghvi, Y. S., Crooke, S. T. and Lebleu, B., eds., Antisense Research and Applications, CRC Press, Boca Raton, 1993, pp. 276-278) and are desirable base substitutions, even more particularly when combined with 2′-O-methoxyethyl or 2′-O-methyl sugar modifications. Representative United States patents that teach the preparation of certain of the above noted modified nucleobases as well as other modified nucleobases include U.S. Pat. Nos. 4,845,205; 5,130,302; 5,134,066; 5,175,273; 5,367,066; 5,432,272; 5,457,187; 5,459,255; 5,484,908; 5,502,177; 5,525,711; 5,552,540; 5,587,469; 5,594,121, 5,596,091; 5,614,617; 5,681,941; and 5,750,692, each of which is herein incorporated by reference.

[0109] Another modification of a nucleobase oligomer of the invention involves chemically linking to the nucleobase oligomer one or more moieties or conjugates that enhance the activity, cellular distribution, or cellular uptake of the oligonucleotide. Such moieties include but are not limited to lipid moieties such as a cholesterol moiety (Letsinger et al., Proc. Natl. Acad. Sci. USA, 86:6553-6556, 1989), cholic acid (Manoharan et al., Bioorg. Med. Chem. Let, 4:1053-1060, 1994), a thioether, e.g., hexyl-S-tritylthiol (Manoharan et al., Ann. N.Y. Acad. Sci., 660:306-309, 1992; Manoharan et al., Bioorg. Med. Chem. Let., 3:2765-2770, 1993), a thiocholesterol (Oberhauser et al., Nucl. Acids Res., 20:533-538: 1992), an aliphatic chain, e.g., dodecandiol or undecyl residues (Saison-Behmoaras et al., EMBO J., 10:1111-1118, 1991; Kabanov et al., FEBS Lett., 259:327-330, 1990; Svinarchuk et al., Biochimie, 75:49-54, 1993), a phospholipid, e.g., di-hexadecyl-rac-glycerol or triethylammonium 1,2-di-O-hexadecyl-rac-glycero-3-H-phosphonate (Manoharan et al., Tetrahedron Lett., 36:3651-3654, 1995; Shea et al., Nucl. Acids Res., 18:3777-3783, 1990), a polyamine or a polyethylene glycol chain (Manoharan et al., Nucleosides & Nucleotides, 14:969-973, 1995), or adamantane acetic acid (Manoharan et al., Tetrahedron Left., 36:3651-3654, 1995), a palmityl moiety (Mishra et al., Biochim. Biophys. Acta, 1264:229-237, 1995), or an octadecylamine or hexylamino-carbonyl-oxycholesterol moiety (Crooke et al., J. Pharmacol. Exp. Ther., 277:923-937, 1996. Representative United States patents that teach the preparation of such nucleobase oligomer conjugates include U.S. Pat. Nos. 4,587,044; 4,605,735; 4,667,025; 4,762,779; 4,789,737; 4,824,941; 4,828,979; 4,835,263; 4,876,335; 4,904,582; 4,948,882; 4,958,013; 5,082,830; 5,109,124; 5,112,963; 5,118,802; 5,138,045; 5,214,136; 5,218,105; 5,245,022; 5,254,469; 5,258,506; 5,262,536; 5,272,250; 5,292,873; 5,317,098; 5,371,241, 5,391,723; 5,414,077; 5,416,203, 5,451,463; 5,486,603; 5,510,475; 5,512,439; 5,512,667; 5,514,785; 5,525,465; 5,541,313; 5,545,730; 5,552,538; 5,565,552; 5,567,810; 5,574,142; 5,578,717; 5,578,718; 5,580,731; 5,585,481; 5,587,371; 5,591,584; 5,595,726; 5,597,696; 5,599,923; 5,599,928; 5,608,046; and 5,688,941, each of which is herein incorporated by reference.

[0110] The present invention also includes nucleobase oligomers that are chimeric compounds. “Chimeric” nucleobase oligomers are nucleobase oligomers, particularly oligonucleotides, that contain two or more chemically distinct regions, each made up of at least one monomer unit, i.e., a nucleotide in the case of an oligonucleotide. These nucleobase oligomers typically contain at least one region where the nucleobase oligomer is modified to confer, upon the nucleobase oligomer, increased resistance to nuclease degradation, increased cellular uptake, and/or increased binding affinity for the target nucleic acid. An additional region of the nucleobase oligomer may serve as a substrate for enzymes capable of cleaving RNA:DNA or RNA:RNA hybrids. By way of example, RNase H is a cellular endonuclease which cleaves the RNA strand of an RNA:DNA duplex. Activation of RNase H, therefore, results in cleavage of the RNA target, thereby greatly enhancing the efficiency of nucleobase oligomer inhibition of gene expression. Consequently, comparable results can often be obtained with shorter nucleobase oligomers when chimeric nucleobase oligomers are used, compared to phosphorothioate deoxyoligonucleotides hybridizing to the same target region.

[0111] Chimeric nucleobase oligomers of the invention may be formed as composite structures of two or more nucleobase oligomers as described above. Such nucleobase oligomers, when oligonucleotides, have also been referred to in the art as hybrids or gapmers. Representative United States patents that teach the preparation of such hybrid structures include U.S. Pat. Nos. 5,013,830; 5,149,797; 5,220,007; 5,256,775; 5,366,878; 5,403,711; 5,491,133; 5,565,350; 5,623,065; 5,652,355; 5,652,356; and 5,700,922, each of which is herein incorporated by reference in its entirety.

[0112] The nucleobase oligomers used in accordance with this invention may be conveniently and routinely made through the well-known technique of solid phase synthesis. Equipment for such synthesis is sold by several vendors including, for example, Applied Biosystems (Foster City, Calif.). Any other means for such synthesis known in the art may additionally or alternatively be employed. It is well known to use similar techniques to prepare oligonucleotides such as the phosphorothioates and alkylated derivatives.

[0113] The nucleobase oligomers of the invention may also be admixed, encapsulated, conjugated or otherwise associated with other molecules, molecule structures or mixtures of compounds, as for example, liposomes, receptor targeted molecules, oral, rectal, topical or other formulations, for assisting in uptake, distribution and/or absorption. Representative

[0114] U.S. patents that teach the preparation of such uptake, distribution and/or absorption assisting formulations include U.S. Pat. Nos. 5,108,921; 5,354,844; 5,416,016; 5,459,127; 5,521,291; 5,543,158; 5,547,932; 5,583,020; 5,591,721; 4,426,330; 4,534,899; 5,013,556; 5,108,921; 5,213,804; 5,227,170; 5,264,221; 5,356,633; 5,395,619; 5,416,016; 5,417,978; 5,462,854; 5,469,854; 5,512,295; 5,527,528; 5,534,259; 5,543,152; 5,556,948; 5,580,575; and 5,595,756, each of which is herein incorporated by reference.

[0115] The nucleobase oligomers of the invention encompass any pharmaceutically acceptable salts, esters, or salts of such esters, or any other compound that, upon administration to an animal, is capable of providing (directly or indirectly) the biologically active metabolite or residue thereof. Accordingly, for example, the disclosure is also drawn to prodrugs and pharmaceutically acceptable salts of the compounds of the invention, pharmaceutically acceptable salts of such prodrugs, and other bioequivalents.

[0116] The term “pharmaceutically acceptable salts” refers to salts that retain the desired biological activity of the parent compound and do not impart undesired toxicological effects thereto. Pharmaceutically acceptable base addition salts are formed with metals or amines, such as alkali and alkaline earth metals or organic amines. Examples of metals used as cations are sodium, potassium, magnesium, calcium, and the like. Examples of suitable amines are N,N′-dibenzylethylenediamine, chloroprocaine, choline, diethanolamine, dicyclohexylamine, ethylenediamine, N-methylglucamine, and procaine (see, for example, Berge et al., J. Pharma Sci., 66:1-19, 1977). The base addition salts of acidic compounds are prepared by contacting the free acid form with a sufficient amount of the desired base to produce the salt in the conventional manner. The free acid form may be regenerated by contacting the salt form with an acid and isolating the free acid in the conventional manner. The free acid forms differ from their respective salt forms somewhat in certain physical properties such as solubility in polar solvents, but otherwise the salts are equivalent to their respective free acid for purposes of the present invention. As used herein, a “pharmaceutical addition salt” includes a pharmaceutically acceptable salt of an acid form of one of the components of the compositions of the invention. These include organic or inorganic acid salts of the amines. Preferred acid salts are the hydrochlorides, acetates, salicylates, nitrates and phosphates. Other suitable pharmaceutically acceptable salts are well known to those skilled in the art and include basic salts of a variety of inorganic and organic acids, such as, for example, with inorganic acids, such as for example hydrochloric acid, hydrobromic acid, sulfuric acid or phosphoric acid; with organic carboxylic, sulfonic, sulfo or phospho acids or N-substituted sulfamic acids, for example acetic acid, propionic acid, glycolic acid, succinic acid, maleic acid, hydroxymaleic acid, methylmaleic acid, fumaric acid, malic acid, tartaric acid, lactic acid, oxalic acid, gluconic acid, glucaric acid, glucuronic acid, citric acid, benzoic acid, cinnamic acid, mandelic acid, salicylic acid, 4-aminosalicylic acid, 2-phenoxybenzoic acid, 2-acetoxybenzoic acid, embonic acid, nicotinic acid or isonicotinic acid; and with amino acids, such as the 20 alpha-amino acids involved in the synthesis of proteins in nature, for example glutamic acid or aspartic acid, and also with phenylacetic acid, methanesulfonic acid, ethanesulfonic acid, 2-hydroxyethanesulfonic acid, ethane-1,2-disulfonic acid, benzenesulfonic acid, 4-methylbenzenesulfonic acid, naphthalene-2-sulfonic acid, naphthalene-1,5-disulfonic acid, 2- or 3-phosphoglycerate, glucose-6-phosphate, N-cyclohexylsulfamic acid (with the formation of cyclamates), or with other acid organic compounds, such as ascorbic acid. Pharmaceutically acceptable salts of compounds may also be prepared with a pharmaceutically acceptable cation. Suitable pharmaceutically acceptable cations are well known to those skilled in the art and include alkaline, alkaline earth, ammonium and quaternary ammonium cations. Carbonates or hydrogen carbonates are also possible.

[0117] For oligonucleotides and other nucleobase oligomers, suitable pharmaceutically acceptable salts include (i) salts formed with cations such as sodium, potassium, ammonium, magnesium, calcium, polyamines such as spermine and spermidine, etc.; (ii) acid addition salts formed with inorganic acids, for example hydrochloric acid, hydrobromic acid, sulfuric acid, phosphoric acid, nitric acid and the like; (iii) salts formed with organic acids such as, for example, acetic acid, oxalic acid, tartaric acid, succinic acid, maleic acid, fumaric acid, gluconic acid, citric acid, malic acid, ascorbic acid, benzoic acid, tannic acid, palmitic acid, alginic acid, polyglutamic acid, naphthalenesulfonic acid, methanesulfonic acid, p-toluenesulfonic acid, naphthalenedisulfonic acid, polygalacturonic acid, and the like; and (iv) salts formed from elemental anions such as chlorine, bromine, and iodine.

[0118] The present invention also includes pharmaceutical compositions and formulations that include the nucleobase oligomers of the invention. The pharmaceutical compositions of the present invention may be administered in a number of ways depending upon whether local or systemic treatment is desired and upon the area to be treated. Administration may be topical (including ophthalmic and to mucous membranes including vaginal and rectal delivery), pulmonary, e.g., by inhalation or insufflation of powders or aerosols, including by nebulizer; intratracheal, intranasal, epidermal and transdermal), oral, or parenteral. Parenteral administration includes intravenous, intraarterial, subcutaneous, intraperitoneal, or intramuscular injection or infusion; or intracranial, e.g., intrathecal or intraventricular, administration.

### Test Compounds and Extracts

[0119] In one aspect, the invention provides methods of screening for agents that have the ability to inhibit splicing with a retrotransposon. Thus, in various embodiments, a test compound will be an antisense oligonucleotide that targets a retrotransposon splice site or a retrotransposon splice enhancer site. Additionally, other compounds may be screened for the desired activity.

[0120] In general, small molecule compounds are known in the art or are identified from large libraries of both natural product or synthetic (or semi-synthetic) extracts or chemical libraries or from polypeptide or nucleic acid libraries, according to methods known in the art. Those skilled in the field of drug discovery and development will understand that the precise source of test extracts or compounds is not critical to the screening procedure(s) of the invention. Compounds used in screens may include known compounds (for example, known therapeutics used for other diseases or disorders). Alternatively, virtually any number of unknown chemical extracts or compounds can be screened using the methods described herein. Examples of such extracts or compounds include, but are not limited to, plant-, fungal-, prokaryotic- or animal-based extracts, fermentation broths, and synthetic compounds, as well as modification of existing compounds.

[0121] Numerous methods are also available for generating random or directed synthesis (e.g., semi-synthesis or total synthesis) of any number of chemical compounds, including, but not limited to, saccharide-, lipid-, peptide-, and nucleic acid-based compounds. Synthetic compound libraries are commercially available from Brandon Associates (Merrimack, N.H.) and Aldrich Chemical (Milwaukee, Wis.). Alternatively, chemical compounds to be used as candidate compounds can be synthesized from readily available starting materials using standard synthetic techniques and methodologies known to those of ordinary skill in the art. For example, a library of 8,000 novel small molecules is available, which was created using combinatorial methods of Diversity-Oriented Synthesis (DOS) (corner et al, Proc Natl Acad Sci U S A 108, 6751 (Apr. 26, 2011; Lowe et al, J Org Chem 77, 7187 (Sep 7, 2012); Marcaurelle et al, J Am Chem Soc 132, 16962 (Dec 1, 2010))—to investigate chemical compounds not represented in traditional pharmaceutical libraries (Schreiber, S. L. (2000). Science 287, 1964-1969; Schreiber et al, Nat Biotechnol 28, 904 (Sep, 2010), each of which is herein incorporated by reference in their entirety). Synthetic chemistry transformations and protecting group methodologies (protection and deprotection) useful in synthesizing the compounds identified by the methods described herein are known in the art and include, for example, those such as described in R. Larock, Comprehensive Organic Transformations, VCH Publishers (1989); T. W. Greene and P. G. M. Wuts, Protective Groups in Organic Synthesis, 2nd ed., John Wiley and Sons (1991); L. Fieser and M. Fieser, Fieser and Fieser's Reagents for Organic Synthesis, John Wiley and Sons (1994); and L. Paquette, ed., Encyclopedia of Reagents for Organic Synthesis, John Wiley and Sons (1995), and subsequent editions thereof.

[0122] Alternatively, libraries of natural compounds in the form of bacterial, fungal, plant, and animal extracts are commercially available from a number of sources, including Biotics (Sussex, UK), Xenova (Slough, UK), Harbor Branch Oceangraphics Institute (Ft. Pierce, Fla.), and PharmaMar, U.S.A. (Cambridge, Mass.). In addition, natural and synthetically produced libraries are produced, if desired, according to methods known in the art, e.g., by standard extraction and fractionation methods. Examples of methods for the synthesis of molecular libraries can be found in the art, for example in: DeWitt et al., Proc. Natl. Acad. Sci. U.S.A. 90:6909, 1993; Erb et al., Proc. Natl. Acad. Sci. USA 91:11422, 1994; Zuckermann et al., J. Med. Chem. 37:2678, 1994; Cho et al., Science 261:1303, 1993; Carrell et al., Angew. Chem. Int. Ed. Engl. 33:2059, 1994; Carell et al., Angew. Chem. Int. Ed. Engl. 33:2061, 1994; and Gallop et al., J. Med. Chem. 37:1233, 1994. Furthermore, if desired, any library or compound is readily modified using standard chemical, physical, or biochemical methods.

[0123] Libraries of compounds may be presented in solution (e.g., Houghten, Biotechniques 13:412-421, 1992), or on beads (Lam, Nature 354:82-84, 1991), chips (Fodor, Nature 364:555-556, 1993), bacteria (Ladner, U.S. Pat. No. 5,223,409), spores (Ladner U.S. Pat. No. 5,223,409), plasmids (Cull et al., Proc Natl Acad Sci USA 89:1865-1869, 1992) or on phage (Scott and Smith, Science 249:386-390, 1990; Devlin, Science 249:404-406, 1990; Cwirla et al. Proc. Natl. Acad. Sci. 87:63786382, 1990; Felici, J. Mol. Biol. 222:301-310, 1991; Ladner supra.).

[0124] In addition, those skilled in the art of drug discovery and development readily understand that methods for dereplication (e.g., taxonomic dereplication, biological dereplication, and chemical dereplication, or any combination thereof) or the elimination of replicates or repeats of materials already known for their activity should be employed whenever possible.

[0125] When a crude extract is identified as containing a compound of interest, further fractionation of the positive lead extract is necessary to isolate chemical constituents responsible for the observed effect. Thus, the goal of the extraction, fractionation, and purification process is the careful characterization and identification of a chemical entity within the crude extract that achieves a desired biological effect. Methods of fractionation and purification of such heterogenous extracts are known in the art.

[0126] Small molecules of the invention preferably have a molecular weight below 2,000 daltons, more preferably between 300 and 1,000 daltons, and most preferably between 400 and 700 daltons. It is preferred that these small molecules are organic molecules.

### Therapy

[0127] Therapy may be provided wherever therapy associated with a genetic disorder is performed: at home, the doctor's office, a clinic, a hospital's outpatient department, or a hospital. Treatment generally begins at a hospital so that the doctor can observe the therapy's effects closely and make any adjustments that are needed. The duration of the therapy depends on the kind of genetic disorder being treated, the age and condition of the patient, the type of the patient's disease, and how the patient's body responds to the treatment.

[0128] An antisense oligonucleotide or antisense nucleobase oligomer of the invention may be administered within a pharmaceutically-acceptable diluent, carrier, or excipient, in unit dosage form. Conventional pharmaceutical practice may be employed to provide suitable formulations or compositions to administer the compounds to patients suffering from a disease that is associated with insertion of a transposable element. Administration may begin before the patient is symptomatic. Any appropriate route of administration may be employed, for example, administration may be parenteral, intravenous, intraarterial, subcutaneous, intratumoral, intramuscular, intracranial, intraorbital, ophthalmic, intraventricular, intrahepatic, intracapsular, intrathecal, intracisternal, intraperitoneal, intranasal, aerosol, suppository, or oral administration. For example, therapeutic formulations may be in the form of liquid solutions or suspensions; for oral administration, formulations may be in the form of tablets or capsules; and for intranasal formulations, in the form of powders, nasal drops, or aerosols.

[0129] Methods well known in the art for making formulations are found, for example, in “Remington: The Science and Practice of Pharmacy” Ed. A. R. Gennaro, Lippincourt Williams & Wilkins, Philadelphia, Pa., 2000. Formulations for parenteral administration may, for example, contain excipients, sterile water, or saline, polyalkylene glycols such as polyethylene glycol, oils of vegetable origin, or hydrogenated napthalenes. Biocompatible, biodegradable lactide polymer, lactide/glycolide copolymer, or polyoxyethylene-polyoxypropylene copolymers may be used to control the release of the compounds. Other potentially useful parenteral delivery systems for TE antisense oligonucleotides include ethylene-vinyl acetate copolymer particles, osmotic pumps, implantable infusion systems, and liposomes. Formulations for inhalation may contain excipients, for example, lactose, or may be aqueous solutions containing, for example, polyoxyethylene-9-lauryl ether, glycocholate and deoxycholate, or may be oily solutions for administration in the form of nasal drops, or as a gel.

[0130] The formulations can be administered to human patients in therapeutically effective amounts (e.g., amounts which prevent, eliminate, or reduce a pathological condition) to provide therapy for a disease or condition. The preferred dosage of a nucleobase oligomer of the invention is likely to depend on such variables as the type and extent of the disorder, the overall health status of the particular patient, the formulation of the compound excipients, and its route of administration.

[0131] For any of the methods of application described above, a nucleobase oligomer of the invention is desirably administered intravenously or is applied to the site of the needed intervention (e.g., by injection).

### Kits

[0132] The invention provides kits for the treatment or prevention of a genetic disease associated with insertion of a transposable element. In one embodiment, the kit includes a pharmaceutical pack comprising an effective amount of an antisense oligonucleotide that targets a splice acceptor site associated with insertion of a transposable element or which targets a sequence associated with the transposable element (e.g., SVA sequence). Preferably, the compositions are present in unit dosage form. In some embodiments, the kit comprises a sterile container which contains a therapeutic or prophylactic composition; such containers can be boxes, ampules, bottles, vials, tubes, bags, pouches, blister-packs, or other suitable container forms known in the art. Such containers can be made of plastic, glass, laminated paper, metal foil, or other materials suitable for holding medicaments.

[0133] If desired compositions of the invention or combinations thereof are provided together with instructions for administering them to a subject having a genetic disorder associated with insertion of a transposable element. The instructions will generally include information about the use of the compounds for the treatment or prevention of the genetic disorder. In other embodiments, the instructions include at least one of the following: description of the oligonucleotide(s); dosage schedule and administration for treatment of a genetic disorder or symptoms thereof; precautions; warnings; indications; counter-indications; overdosage information; adverse reactions; animal pharmacology; clinical studies; and/or references. The instructions may be printed directly on the container (when present), or as a label applied to the container, or as a separate sheet, pamphlet, card, or folder supplied in or with the container.

[0134] The practice of the present invention employs, unless otherwise indicated, conventional techniques of molecular biology (including recombinant techniques), microbiology, cell biology, biochemistry and immunology, which are well within the purview of the skilled artisan. Such techniques are explained fully in the literature, such as, “Molecular Cloning: A Laboratory Manual”, second edition (Sambrook, 1989); “Oligonucleotide Synthesis” (Gait, 1984); “Animal Cell Culture” (Freshney, 1987); “Methods in Enzymology” “Handbook of Experimental Immunology” (Weir, 1996); “Gene Transfer Vectors for Mammalian Cells” (Miller and Calos, 1987); “Current Protocols in Molecular Biology” (Ausubel, 1987); “PCR: The Polymerase Chain Reaction”, (Mullis, 1994); “Current Protocols in Immunology” (Coligan, 1991). These techniques are applicable to the production of the polynucleotides and polypeptides of the invention, and, as such, may be considered in making and practicing the invention. Particularly useful techniques for particular embodiments will be discussed in the sections that follow.

[0135] The following examples are put forth so as to provide those of ordinary skill in the art with a complete disclosure and description of how to make and use the assay, screening, and therapeutic methods of the invention, and are not intended to limit the scope of what the inventors regard as their invention.

### EXAMPLES

### Example 1

### Antisense Oligonucleotides for the Treatment of Genetic Disease

[0136] A child presented with a severe rapidly progressing neurodegenerative disease affecting the brain and retina, whose symptoms were consistent with Batten Disease, which is a rare recessive genetic disorder. Sequence analysis of a biological sample from the child identified the presence of a heterozygous mutation, heterozygous mutation in MFSD8, designated 1102G.C, which is predicted to results in an amino acid substitution (Asp368His). This variant is located at the last nucleotide of an exon and is predicted to result in defective splicing. It had previously been reported in the homozygous state in one patient affected with NCL. It was also reported in the heterozygous state with another missense variant in a patient with macular dystrophy.

[0137] The presence of a single heterozygous mutation in an affected patient was unexpected given that Batten disease is a recessive genetic disorder. This begs the question of where the second allele is? Whole genome sequencing of the affected child, parents and a sibling identified the insertion of a retrotransposon in the affected child's genome present at a position on the chromosome corresponding to an intron ofMFSD8/CLN7 (FIG. 1, FIG. 2). Whole genome sequencing (WGS) was carried out using the following oligonucleotides. Point mutations detected via WGS were confirmed by PCR amplification and Sanger sequencing. The SVA transposon insertion was confirmed by PCR amplification and a series of primer walking experiments. Primer sequences are provided in the table below.

TABLE 1

| Primer name | Sequence |
|---|---|
| TY701-MFSD8-intron6-F1 | CGGTAGGTGCAATATTTTAGTCC |
| TY702-MFSD8-intron6-R1 | ACTGCTGGATAAAGCACTCTAAA |
| TY703-MFSD8-intron6-F2 | GCCTGAAAAGCTTCGATGAC |
| TY704-MFSD8-intron6-R2 | TGGCAAAAACTCAATTGGAA |
| TY706-MFSD8-intron6-SVAC2-R12 | CACCGCCCTTAATCCATTT |
| TY708-MFSD8-intron6-SVAC2-F11 | AAGGCAGCATGCTCGTTAAG |
| TY711-MFSD8-intron6-Ghr20-R13 | TCAACATCCATTCTTGACCA |
| TY712-MFSD8-intron6-Chr20-F13 | CAATTTTGGTCAAGAATGGATG |
| TY719-MFSD8-intron6-5′-F5 | TTCCAATAATAAGCCCTCAACAA |
| TY720-MRSD8-intron6-5′-F6 | CCAGTCTACCCTCAGTATCTAGCA |
| TY721-MFSD8-intron6-5′-F7 | CATGAGGACATGGTTTGAGTCT |
| TY725-MFSD8-Tra-SVAR-R-31 | GCCTCCACACCACTGAGC |
| TY727-708 MUTATION-F | AGGGCAGCATGCTCGTTGAG |
| TY728-MFSD8-intron6-Chr20-R | ACCAGTTTAATAAAAGAAACAAGAATG |
| TY729-MFSD8-Exon6-F1 | TGCTGGTGCTACTTCCCTTC |
| TY730-MFSD8-Exon5-F2 | AACAAGTTCCATGGCAAACA |
| TY731-MFSD8-Exon7-R1 | TCACATCCCATGTCACACCT |
| TY732-MFSD8-trans-SVAE-R | TATCCACACAGACCCAGCAA |
| TY 735-Seq-Transpo-727-R | GGAGGGAAGGTCAGCAGATA |
| TY 736-Seq-Transpo-732-F | GGCGGTTTTGTGGAATAGAA |

[0138] WGS unexpectedly revealed a maternally inherited retrotransposon insertion into intron 6 of the subject's CLN7/MFSD8 gene. When WGS reads from the subject were aligned to the reference genome and visualized in Integrative Genomics Viewer (IGV), the insertion manifested as a cluster of “chimeric reads” that aligned only partially to the reference genome, because they spanned the boundaries of the reference sequence and the foreign sequence (FIG. 5A, top). The chimeric read cluster was detected in the subject and her mother, but not her father, indicating maternal inheritance of the insertion. Inspection of the chimeric read alignments showed that they either had unmapped (a.k.a. “soft-clipped”) polyT sequences on one end or unmapped hexameric repeat sequences (AGAGGG) on the other end, indicating that the insertion contained these motifs at the boundaries (FIG. 5A, bottom). In addition, the chimeric read breakpoints flanked a 14 bp sequence that aligns well to all chimeric reads, suggesting that this 14 bp endogenous sequence was duplicated and is present in both boundaries of the insertion. These features (polyT stretch, hexameric repeats, and retrotransposon target site duplication) were consistent with the insertion of SVA family retrotransposon into the minus strand of the reference genome, the sense strand of CLN7/MFSD8 (FIGS. 5E and 5F).

[0139] PCR amplification and Sanger sequencing using a primer walking approach was employed to sequence across the breakpoints, revealing a ˜2 kb insertion in both the subject and in her mother (FIG. 5G). RepeatMasker analysis confirmed that the sequenced insertion was indeed a SVA retrotransposon. The presence of this SVA was also confirmed on a CLIA basis both in the subject and in her mother by Claritas Genomics. CLIA analysis also confirmed absence of the SVA insertion in the subject's father, and also demonstrated that the subject's brother bore neither the SVA insertion nor the paternal missense mutation (CLN7/MFSD8 c.1102G>C) (FIG. 5G, 5H). The segregation pattern of the SVA insertion is therefore consistent with it being the pathogenic cause (in combination with c.1102G>C) of neurodegeneration in the subject. SVA retrotransposons are the youngest and most active family of retrotransposons in the human genome. They are specific to hominids, and are present in ˜2700 copies per genome (representing ˜0.2% of the human genome). There have been thirteen documented cases of SVA insertions causing Mendelian disease in human by interrupting a human disease-associated gene. the subject's SVA insertion into CLN7/MFSD8 has never been reported.

[0140] SVA retrotransposons are known to encode strong splice enhancer sequences that modulate patterns of splicing of nearby genes, sometimes resulting in exon trapping (Hancks et al, Genome Research 2009). To understand whether this may be occurring with the subject's SVA retrotransposon, splicing patterns were examined using RNA-seq analysis. Splice junction analysis of >126 million read pairs, using polyA+RNA isolated from the subject's whole blood, revealed that SVA retrotransposon insertion into intron 6 activates a cryptic splice site (“i6.SA”) 133 basepairs upstream of the insertion site (FIG. 5I). Splicing from exon 6 into i6.SA was detected in RNA isolated from the subject as well as from her mother, but neither her father nor her brother (who do not carry the SVA insertion). These results were confirmed with RT-PCR from patient fibroblasts and from whole blood and lymphoblasts from all four family members (FIG. 5J). Abnormal splicing into i6.SA results in an immediate stop codon and truncation of the CLN7/MFSD8 protein product (p.184PhefsX3).

[0141] The retrotransposon insertion was discovered by chimeric reads with intron 6 sequences fused to polyT and and tandem GGGAGA repeats, respectively (FIGS. 5A-5D). This retrotransposon insertion generated a stop codon in the intron following exon six, resulting in MFSD8 gene truncation and loss of protein function (FIG. 2). In essence, the transposon insertion was acting as an exon trap. Exon trapping is a molecular biology technique used to identify the presence of exons in a fragment of DNA. In exon trapping a genomic fragment of unknown intron/exon structure is inserted into the intron of a splicing vector consisting of a known exon—intron—exon sequence of DNA. If the fragment does not contain exons (i.e., consists solely of intron DNA), it will be spliced out together with the vector's original intron. On the other hand, if exons are contained, the exons will be part of the mature mRNA after transcription (with all intron material removed). The presence of ‘trapped exons’ can be detected by an increase in size of the mRNA.

[0142] The genetic disorder present in the affected child could be ameliorated if the stop codon produced by the intron could be skipped allowing restoration of the normal reading frame (FIG. 3, FIG. 4).

[0143] Exon skipping, or splice modulation in general, can be treated by antisense oligonucleotide therapy. Exon skipping is achieved using antisense oligonucleotides, which have the ability to hybridize to a sense target sequence, modulating splicing patterns of the target molecule. Antisense-mediated exon skipping has been shown to be useful for the restoration of a normal reading frame in genes impaired by mutations that alter undesirable gene splicing. This approach can be effective when the skipped exon is not critical for protein function, or when a non-productive exon is brought into play by a patient mutation. Exon skipping has been used to treat Duchenne's Muscular Dystrophy, where partial protein function is maintained despite the absence of the skipped exons, as well as spinal muscular atrophy, where full protein function is restored by restoring normal splicimg patterns to a functionally substitutable pseudogene.

[0144] To determine whether steric blockade via an antisense oligonucleotide could be utilized to rescue CLN7/MFSD8 exon trapping induced by subject's SVA, a series of antisense oligonucleotides, complementary to the i6.SA cryptic splice acceptor site and nearby computationally predicted splice enhancers (RESCUE-ESE (Fairbrother et al., 2004) and ESEfinder (Smith et al., 2006) (FIG. 6A) were designed and synthesized.

[0145] Antisense oligonucleotides were generated to target the splice acceptor site and predicted splice enhancer sequences flanking it. Exemplary antisense oligonucleotides that were generated and tested are shown at the following Table 2A.

TABLE 2A
Antisense Oligonucleotides Targeting
Splice Enhancer Sequences

| Name | Sequence |
|---|---|
| TY790 (TY777A) | TTAGTGCTTGTTGAGGGC |
| TY791(TY777B) | GTTAGTGCTTGTTGAGGG |
| TY792(TY777C) | TGTTAGTGCTTGTTGAGG |
| TY793(TY777D) | ATGTTAGTGCTTGTTGAG |
| TY777-MFSD8ASO-2MOE | AATGTTAGTGCTTGTTGAGGGC |

[0146] Additional sequences of the antisense oligonucleotides used in these studies, designed to be complementary to computationally predicted splice enhancers surrounding the i6. SA splice site, are shown in following Table 2B.

| ASO name | Sequence | Modifications | Manufacturer |
|---|---|---|---|
| TY765-MFSD8-ASO-1 | AGCUUUUCAGGCUUACAUUUACUCAUCU | PS 2′-OMe | IDT |
| TY766-MFSD8-ASO | AAUGUUAGUGCUUGUUGAGGGC | PS 2′-OMe | IDT |
| TY767-5MFSD8-ASO- | CUAGCAUACAGUAAGCACACA | PS 2′-OMe | IDT |
| TY768-MFSD8-ASO- | CUUUAAAAUGCUUUUAAGGUGGUA | PS 2′-OMe | IDT |
| TY769-MFSD8-ASO-1A | CAGGCUUACAUUUACUCAUCU | PS 2′-OMe | IDT |
| TY770-MFSD8-ASO-1B | GUCAUCGAAGCUUUUCAGG | PS 2′-OMe | IDT |
| TY777-MFSD8ASO-2MOE | AAUGUUAGUGCUUGUUGAGGGC | PS 2′-OMe, 5Me-C, 5Me-U | IDT |
| TY772_22 nt | CGCGACTATACGCGCAATATGC | PS 2′-OMe | IDT |

[0147] Fibroblasts of the patient were isolated and cultured to study lysosomal activity and function. Fibroblasts and LCL were transiently transfected with ASOs using Lipofectamine™ 3000 (ThermoFisher) according to the manufacturer's instructions. ASOs were used at 100 nM. Transfected cells were harvested at 24 hours. For dose-response experiments, fibroblasts were transfected by electroporation (Neon Transfection System, ThermoFisher) according to the manufacturer's instructions. instructions. ASO were used at concentrations ranging from 1-1000 nM as indicated.

[0148] After 24 hours, RNA was isolated, and RT-PCR was utilized to assess levels of normal exon 6 to exon 7 vs. abnormal mutant splice product (FIG. 6A). In untransfected cells or cells transfected with a scrambled oligonucleotide control (TY772), the ratio of normal to mutant splice forms ranged around 1:1 (FIGS. 6B and C). An initial screen was conducted using fully phosphorothioated, 2′-OMe-modified oligonucleotides. From this initial screen, two candidates, TY765 and TY766, emerged that significantly increased the ratio of normal:mutant splice ratio by 2.5- to 3-fold in patient fibroblasts (FIG. 6B). TY765 is a 28-nucleotide oligonucleotide that is complementary to a cluster of predicted splice enhancer motifs directly overlying the i6.SA splice acceptor site, while TY766 is a 22-nucleotide oligonucleotide that targets a cluster of predicted splice enhancer motifs 48 bp downstream of the i6.SA site (FIG. 6A). The latter was selected as our lead candidate because its shorter length may help with biodistribution and cellular uptake in vivo. In order to match the chemistry with that of nusinersen—an FDA-approved 18-nucleotide oligonucleotide for spinal muscular atrophy that has shown minimal toxicity—TY777, a fully phosphorothioated, 2′-O-methoxyethyl (PS 2′-MOE) version of the same sequence as TY766 was generated. Similar to TY766, TY777 resulted in 3-fold increase in the ratio of normal to mutant CLN7/MFSD8 splicing (FIGS. 6B, and C).

[0149] To validate these initial findings, patient cell lines and oligonucleotide reagents were provided to the BCH TransLab. Their blinded experiments replicated the initial findings, not only in patient fibroblasts, but in patient lymphoblasts as well (FIG. 8A, 8B). Consistent with these results, TY766 and TY777 showed the most consistent and largest magnitude level of splice correction. TY777 became the lead candidate for compassionate use for the patient. It was renamed it milasen/TY777.

[0150] Milasen/TY777 was investigated using (1) qRT-PCR experiments to study dose-response relationships and (2) RNA-seq to confirm its splice correction effect. First, when electroporated into patient fibroblasts at a range of doses (0, 1, 10, 20, 50, 100, 200, 500 nM), milasen/TY777 demonstrated a half-maximal inhibitory effect (IC50) on abnormal exon 6 to i6.SA splicing at ˜17.4 nM, and a half-maximal effective concentration (EC50) of ˜36.9 nM in terms of activation of normal exon 6 to exon 7 splicing (FIG. 10). These values are similar to those obtained in early proof of concept studies with antisense oligonucleotides targeting SMN2. These data also indicate that the potency of milacin/TY777 meets previously suggested criterion (EC50 less than 100 nM in a cellular assay) for preclinical antisense oligonucleotide candidates.

[0151] As additional confirmation, RNA-seq was carried out of polyA+ RNA isolated from untransfected, mock-transfected, and milasen/TY777-transfected patient fibroblasts (FIG. 11). Transfection with milasen/TY777 at 100 nM concentration boosted normal exon 6 to exon 7 splicing to 32% of local splice junctions, compared to 7-11% from mock-transfected patient fibroblasts or those transfected with a scrambled oligonucleotide (p<0.001 for both comparisons, Chi-Square Test) (FIG. 11).

[0152] In silico sequence analysis of Milasen/TY777 demonstrated absence of predicted off-target binding sites. Since off-target binding of an oligonucleotide can lead to side effects and toxicity, potential off-target binding sites of milasen/TY777 in the human genome were examined. To simulate binding of end-degraded oligonucleotide products or partial binding of an intact oligonucleotide with a few nucleotide mismatches at either end, BLAST was used to map progressively smaller subsequences of milasen/TY777 to the human reference sequence (GRCh38/hg38; FIG. 12).

[0153] Milasen/TY777 did not have any off-target matches to the genome until it is trimmed down by 6 nucleotides (down to a 16-mer), whereas nusinersen, an FDAapproved drug with minimal side effect or toxicity, started to have off-target matches when trimmed down by only 1 nucleotide (down to 17mer). This analysis illustrates that milasen/TY777 is likely to have a comparable or smaller off-target binding footprint on the human genome.

### Example 2

### Antisense Oligonucleotides Improved Lysosomal Function in a Fibroblast NCL Model

[0154] The subject's fibroblasts exhibited several cellular phenotypes (FIG. 13A-K) characteristic of lysosomal dysfunction. Subject's fibroblasts showed double the typical lysosomal mass relative to controls (FIG. 13B), consistent with the increase in lysosomal number and size seen in many lysosomal storage disease states. the subject's fibroblasts also demonstrated a strong autofluorescence signal not seen in controls (FIG. 13C), a well-documented observation in neuronal ceroid lipofuscinosis that is associated with functional backup of lysosomes leading to accumulation of lipid and protein aggregates. Finally, the subject's fibroblasts possessed a 40% reduction in enzymatic hydrolase activity within lysosomes (FIG. 13D), but a 5× increase in hydrolase activity within the cytosol (i.e. outside of lysosomes; FIG. 13E), demonstrating a breakdown in proper compartmentalization of lysosomal hydrolases. Lastly, the subject's fibroblasts showed reduced autophagic flux, consistent with lysosomal dysfunction (FIG. 13F).

[0155] Transfection of fibroblasts with milasen/TY777 resulted in significant reduction of lysosomal mass (FIG. 13G), significant reduction of accumulation of autofluorescence pigment (FIG. 13H), significant increases in hydrolase activity within lysosomes (FIG. 13I), and a trend, albeit not reaching significance, towards reduction in hydrolase activity outside of lysosomes (FIG. 13J), and significant restoration of autophagic flux (FIG. 13K). Together, these results provided evidence that oligonucleotide treatment of the subject's cells would not only improve normal splicing but also restore cellular lysosomal function.

[0156] Together, these results demonstrate that the subject harbors an intronic SVA retrotransposon insertion that causes abnormal splicing and exon trapping of CLN7/MFSD8, and provides encouraging evidence that antisense oligonucleotide treatment with TY777/milasen can not only restore normal splicing but also restore cellular lysosomal function.

### Example 3

### Toxicology

[0157] Toxicology was assessed in Sprague-Dawley rats, which are commonly used for intrathecal dosing and tolerate implanted catheters for redosing on longer term studies with few catheter failures or infections. They are sensitive to non-sequence related oligonucleotide toxicity and have been extensively used in oligonucleotide toxicity studies; therefore, they are considered sensitive and relevant. Because milasen is designed to suppress an abnormal splice product caused by the subject's unique gene mutation, there are no applicable target mRNA sequences found in any species, so toxicities seen from milasen in any animal species will be non-target mediated in nature, so there would be no added benefit to risk assessment gained from studying milasen in other species. Similar reasoning (of limiting toxicity to only rodents) is used in cases where specifically designed monoclonals target viruses and no target is present in any healthy animals.

[0158] The rat high dose of 1 mg delivered by intrathecal delivery was considered a No Observed Adverse Effect Level (NOAEL). This was based on the clinical observations (transient hind limb limitations for 24 h), neurological exams (subtler neurobehavioral effects on hind limbs were present at 24 h, but were resolved fully by 5 d, and 8 d as well), and histopathology (no neuronal toxicity was seen in spinal cord or brain). There were no adverse effects evident from hematology or clinical chemistry assessment panels. Notably, class-related effects seen with intravenously delivered oligos did not occur (such as thrombocytopenia, anticoagulant, or nephrotoxicity); this dovetails with the biodistribution data showing limited systemic exposure as assessed by plasma. The only milasen-associated histopathologic findings were minimal to mild vacuolated inflammatory cells that may contain test article or be responding to a combined inflammatory effect from recent surgery (local tissues are disrupted by catheter implant) and lumbar infusion of a foreign, charged substance into a confined area. The presence of inflammatory cells is considered non-adverse since they are seen at day 8 post dosing (necropsy date), when all hind limb effects had resolved. The hind limb effects alone, were carefully examined at multiple time points and fully resolved, and were not associated with any histopathologic evidence of neuronal degeneration. Hind limb weakness was also reported in monkeys following intrathecal dosing with nusinersen, but these also resolved. Therefore, the weight of evidence suggests these transient hind limb effects are nonadverse; taken together, evidence supports using 1 mg in rat as the basis for covering the safe dose ranges in the human subject.

[0159] The rat to human (compartmental) scaling factor was based on estimating the ratio of the highest theoretic concentration at time zero (C0) in the rat and human CSF. C0 (the highest possible concentration immediately post dosing) can be estimated by dividing the delivered mass of drug by the theoretic compartment volume: the highest rat dose (NOAEL) was 1 mg (1000 μg) and dividing by the rat CSF volume (0.300 ml) yields a C0 of 3333 μg/ml. The theoretic C0 instead of the measured CSF value in rats was used because the biodistribution study was very limited in design (due to limited availability of research grade test article) and did not include an immediately-post-dose sacrifice group for obtaining an approximate Cmax. Comparing C0 with the far lower levels seen at 4 hours (3333 vs. 189.1 μg/ml), it seems evident (and consistent with polyphasic pattern of disposition observed with related oligonucleotides) that by 4 hrs, the earliest sacrifice time point, extensive distribution had already occurred primarily into the CNS and cord; very little was distributed to plasma (0.07% was found in plasma at 4 hrs and none thereafter). Therefore, the best basis for rat and human dose comparison is the C0 ratio in CSF for rat and the human subject. To obtain the right scaling factor for the rat and human CSF compartments, the subject's CSF volume was estimated to be 150 ml (a typical volume for her height, weight and age) and rat CSF volume to be 300 μl; rat weights ranged from ˜280 to ˜320 g so this is a reasonable rat compartment volume estimate. This represents a human/rat CSF volume ratio of 500X. In order to provide a conservative safety margin, and considering that there is no animal model of the subject's unique mutation and Batten Disease/NCL, an estimated starting dose in human was used that offers room for dose escalation and the opportunity to monitor the subject's reactions to drug before escalation. The subject's starting dose was 3.5 mg (several fold lower than nusinersen) which will yield an estimated C0 (3500 μg/150 ml), or 23 μg/ml. Compared to 3333 μg/ml at the NOAEL in rats, this is a safety margin (rat/human CSF; C0 concentration ratio) of 142X. Subsequent doses (7 mg and 14 mg) are planned at two week intervals to provide time for gathering safety and efficacy data because the target site of action for the subject is in the brain, and not directly in the spinal cord as in the case for nusinersen and SMA.

TABLE 3

| | | |
|---|---|---|
| Rat | Human | Estimated C0 |

| | | | | | |
|---|---|---|---|---|---|
| 0.007 | mg | 3.5 | mg | 23 | μg/mL |
| 0.014 | mg | 7 | mg | 47 | μg/mL |
| 0.028 | mg | 14 | mg | 93 | μg/mL |
| 0.06 | mg * | 30 | mg | 200 | μg/mL |
| 0.25 | mg * | 125 | mg | 833 | μg/mL |
| 1.0 | mg *† | 500 | mg | 3333 | μg/mL |

* tested; see section 7.1.1. Study No. 5500241 and Section 7.3.1. Study No. 5500230
† rat intrathecal NOAEL

[0160] Dose escalation over time allows for the possibility to explore saving the subject from further decline, possibly reversing some of the more recent losses in function, and giving her only treatment option the best opportunity to work. Further doses escalations are planned if the subject tolerates the drug, but beyond the dose series of 3 doses over 6 weeks.

### Example 4

### Therapeutic Administration of Antisense Oligonucleotides Shows Efficacy in Human Subject

[0161] Additional primers (see below) were designed against sequences within CLN7/MFSD8 and the SVA transposon insertion and used to detect normal and abnormal CLN7/MFSD8 splice products (35 cycles, 98° C. for 5 s, 60° C. for 15 s, and 72° C. for 15 s) using 1μL of cDNA prepared from patient and family member samples. GAPDH and 18S RNA were used as loading controls. For quantification experiments, primers TY715, TY758, and TY759 were used in competitive multiplex PCR.

[0162] TY715/TY759 amplify a 233bp band representing wild-type splicing between exons 6 and 7, whereas TY715/TY759 amplify a 190 bp band representing abnormal splicing between exon 6 and cryptic exon i6. Relative quantities of wild-type and abnormally spliced products were calculated using 2% agarose gel electrophoresis, staining, and densitometry analysis (ImageJ). The primers and probes used in RT-PCR assays are shown in the following table:

TABLE 4

| Primer name | Sequence |
|---|---|
| TY714-MFSD8-RT-F2 | TCTCAGCAGTGTAGGGTTTTCT |
| TY715-MFSD8-RT-F3 | TGGAGGAGGAAATGTAGCAGTT |
| TY734-MFSD8-Exon7-R1 | TCACATCCCATGTCACACCT |
| TY743-18S-RNA-RT-F1 | CATTCGAACGTCTGCCCTAT |
| TY744-18S-RNA-HT-R1 | CAATTACAGGGCCTCGAAAG |
| TY747-GAPDH-RT-F1 | GAGTCAACGGATTTGGTCGT |
| TN748-GAPDH-RT-R1 | TTGATTTTGGAGGGATCTCG |
| TY758-MFSD8-I6-R | TGTTAGTGCTTGTTGAGGGCT |
| TY759-MFSD8-E7-R | ATTCCCAGGAAGGCGCTAAG |

### Quantitative RT PCT

[0163] RNA samples were analyzed by RT-qPCR (Comparative Cτ (ΔΔCτ) assay). Two assays (primers/probe sets) were used to amplify abnormal E6-i6 and normal E6-E7 exon junctions. GAPDH was used as an internal control. Untransfected cell samples were used as a reference samples for final ΔΔCτ calculations. Primers and probes used in the TaqMan™ assays are shown in the table below:

TABLE 5

| Primer name | Sequence | Probe label | Amplicon size (bp) |
|---|---|---|---|
| MFSD8-E6-i6-fwd | AGCATGTGTCAAGCATTAGGT | FAM | 101 |
| MFSD8-E6-i6 rev | AGTGCTTGTTGAGGGCTTATT | | |
| MFSD8-E6-i6 probe | AGGTCCAGATGAGTAAATGTAAGCCTGA | | |
| MFSD8-E6-E7 fwd | ACATAAGCATGTGTCAAGCATTAG | FAM | 150 |
| MFSD8-E6-E7 rev | CCAGGAAGGCGCTAAGTAAA | | |
| MFSD8-E6-E7 probe | AGGTGTGACATGGGATGTGATTAAACTGC | | |
| GAPDH fwd | GGTGTGAACCATGAGAAGTATGA | VIC | 123 |
| GAPDH rev | GAGTCCTTCCACGATACCAAAG | | |
| GAPDH probe | AGATCATCAGCAATGCCTCCTGCA | | |

[0164] The present invention provides one or more antisense oligonucleotides that are useful to induce skipping of a deleterious exon associated with the insertion of a retrotransposon into a gene. In particular embodiments, an antisense oligonucleotide targets SVA or a fragment thereof. Antisense oligonucleotides targeting the retrotransposon or a mutation introduced by the retrotransposon are useful for the treatment of diseases or disorders associated with the presence of a deleterious mutation at one allele of a gene and a retrotransposon insertion that disrupts the corresponding allele.

### Example 5

### Therapeutic Effects of Anti-sense Oligonucleotide Therapy

[0165] In November 2016, the subject, a seven year old girl, was diagnosed with a form of Batten disease. Within a year of being diagnosed, she went from playing independently to walking with assistance. Her language has deteriorated, and in September 2017, she had a G-tube placed to maintain her nutritional status in the face of increasing difficulty swallowing. Her seizure frequency has also increased. In an effort to preserve her intelligence and personality, anti-sense oligonucleotide development was undertaken to determine whether blockade of splicing from exon 6 to i6.SA with an antisense oligonucleotide could restore normal CLN7/MFSD8 RNA processing and improve lysosomal functioning.

[0166] Milasen consists of a 22 nucleotide oligonucleotide with 2′-O-methoxyethyl modified bases and a full phosphorothioate. It utilizes the same chemistry as the recently approved oligo, nusinersen, a well-tolerated and highly similar oligo that is injected directly into spinal fluid of infants and children with SMA. Milasen only differs in sequence and slightly in length (22 nucleotides for milasen vs 18 for nusinersen). This is the common length for oligo drugs because the length is sufficient to ensure avid and specific binding to only one site in the subject's genome. These synthetic oligo agents do not integrate into, or otherwise directly alter, the subject's DNA itself—they interact with the CLN7/MFSD8 nuclear RNA transcript, only at the RNA site where her splice defect is exhibited. Because her genome was sequenced, it was determined that there are no other sites which can bind Milasen. Thus, milasen is a selective agent that can correct SVA transposon-induced splicing defect. Substantial oligonucleotide drug levels in brain can be achieved by lumbar intrathecal administration (Finkel et al., Lancet 388, 3017-3026, 2016).

[0167] Milasen will be supplied as a 2 mL vial containing 8.46 mg/mL milasen. Prior to injection, milasen will be diluted with Elliott's B to the indicated dosage level to an injection volume of 5 mL per dose administered intrathecally.

[0168] Milasen is being administered using a dose escalation period followed by a loading phase and a maintenance phase. Doses of 3.5 mg, 7 mg, and 14 mg, each spaced two weeks apart, were used initially. The subject undergoes 48 hours of inpatient observation after each dose. During this phase, blood and CSF samples have been drawn for pharmacokinetic (PK) assessments. CSF samples were withdrawn immediately prior to each dose administration, with samples collected on Day 0, Day 14, Day 28, and Day 42. Also, at each dosage level, blood samples were drawn pre-dosing, immediately post dose, and at 1, 2, 4, 6, 8, 12, 16, and 24 hours post-dosing.

[0169] The subject is showing improvement in response to treatment. Prior to treatment, the subject has between 15-25 seizures per day. Daily seizure activity and overall frequency is trending downward following initiation of therapy. Seizure severity is also trending downward. Following the 4^{th} dose of Milasen, the subject was having about 10 seizures per day.

[0170] Four months after initiation of treatment, the subject had her first seizure free day.

[0171] The results described herein were obtained using the following methods and materials.

### Skin Fibroblast Derivation, Lymphoblastoid Cell Line (LCL) Generation, and Maintenance Fibroblasts

[0172] Patient skin fibroblasts were derived from 3 mm skin punch biopsy by explant culture. Fibroblasts were maintained and passaged in media containing Alpha MEM (Irvine Scientific), Chang Medium B (Irvine Scientific), and supplemented with Chang C Supplement (Irvine Scientific), GlutaMAX™ (Life Technologies) and 10% fetal bovine serum (FBS) (Life Technologies). Fibroblasts used in experiments were under passage 20.

### Lymphoblastoid Cell Lines (LCL)

[0173] 5 ml peripheral blood from each donor (Proband, Mother, Father and Brother) were drawn into a heparinized blood tube. Mononuclear cells (MNC) were isolated by density gradient centrifugation using Ficoll Histoplaque®-1077 (Sigma-Aldrich). LCL were established by infecting MNC with Epstein-Barr Virus (EBV). LCL were established in 2-4 weeks and maintained in RPMI 1640 (Caisson Lab) supplemented with 10% FBS (Life Technologies).

### Transfection

[0174] Fibroblasts and LCL were transiently transfected with ASOs using Lipofectamine™ 3000 (ThermoFisher) according to the manufacturer's instructions. ASOs were used at 100 nM. Transfected cells were harvested at 24 hours. For dose-response experiments, fibroblasts were transfected by electroporation (Neon Transfection System, ThermoFisher) according to the manufacturer's instructions. ASO were used at concentrations ranging from 1-1000 nM as indicated. Transfected cells were harvested at 24 hours.

RNA Extraction and cDNA Synthesis

[0175] Two methods were used for RNA isolation and cDNA synthesis: Total RNA was isolated using Pure Link™ RNA mini kits (Life Technologies) according to the manufacturer's instructions. cDNA synthesis using oligo-dT was performed with the Super Script II reverse transcriptase kit (Invitrogen) according to the manufacturer's instructions.

[0176] Alternatively, total RNA was purified using RNeasy®Plus Mini Kit (Qiagen) according to the manufacturer's instructions. cDNA synthesis was performed in concert with RT-qPCR using gene-specific primers and gScript™ XLT One-Step RT-qPCR ToughMix®, Low ROX™ kits (VWR Quanta Biosciences™)

### RT-PCR

[0177] Primers (see below) were designed against sequences within CLN7/MFSD8 and the SVA transposon insertion and used to detect normal and abnormal CLN7/MFSD8 splice products (35 cycles, 98° C. for 5 s, 60° C. for 15 s, and 72° C. for 15 s) using 1 μL of cDNA prepared from patient and family member samples. GAPDH and 18S RNA were used as loading controls. For quantification experiments, primers TY715, TY758, and TY759 were used in competitive multiplex PCR. TY715/TY759 amplify a 233 bp band representing wildtype splicing between exons 6 and 7, whereas TY715/TY759 amplify a 190 bp band representing abnormal splicing between exon 6 and cryptic exon i6. Relative quantities of wildtype and abnormally spliced products were calculated using 2% agarose gel electrophoresis, staining, and densitometry analysis (ImageJ).

### Dose Response Curve

[0178] Dose-response curves, EC50, and IC50 values were calculated and plotted with Prism software (Graphpad).

### RNA-Seq

[0179] RNA-seq libraries were prepared using WaferGen PrepX kit (WaferGen Biosystems). Sequencing was performed on an Illumina NextSeq machine using 2×150 bp paired-end reads. Library preparation and sequencing was repeated four more times using alternative kits, KAPA Hyper Prep kit (KAPA Biosystems; for library preparation) and HiSeq 2500 (for sequencing). As the replicates showed consistent results, we aggregated the data from all five runs and used it for the analysis in this report. For quality control of sequencing reads, Cutadapt (version 1.11) and Trimmomatic (version 0.36) was used to trim adapter sequences and low quality bases at the ends—reads that were trimmed to be shorter than 30 nts were removed. Reads that contain a region of consecutive low quality bases in the middle were also removed. For alignment, HISAT2 (version 2.1.0) was used to map reads on human genome (hg19) in the paired-end, two-pass mode, generating alignments in SAM format. Using Samtools, the SAM files were converted to BAM format and subsequently sorted and indexed by chromosomal coordinate. Gene annotation was not provided to the alignment program in order to avoid any biased alignment favoring annotated splice junctions. The sorted BAM files were indexed using Samtools. IGV was used to draw Sashimi plots, which showed the number of reads supporting splice junctions in the genomic region containing CLN7/MFSD8 exon 5 through 7.

### Lysosomal Function Assessment

[0180] Lysosomal and cytosolic activity of lysosomal beta-Glucocerebrosidase (GCase) was measured in living cultures of patient and control fibroblasts using the artificial GCase substrate, PFB-FD-Gluc. Activity was normalized to lysosomal mass, quantified by cascade blue dextran, and analyzed as previously described (Mazzulli et al., Proc. Natl. Acad. Sci. 113, 1931-1936, 2016). Autofluorescent pigment was measured by assaying fluorescence of living cells in a microplate reader cultured in phenol red-free media (excitation=485nm, emission at 530 nm). Values are presented as mean+/−SEM and p-values are presented using Student's t-test. For autophagic flux assays, fibroblasts were treated with either DMSO (vehicle control), or bafilomycin Al (Baf Al) to autophagic lysosomal fusion. Cells were extracted in 1% Triton X-100 buffer and response to baf Al was analyzed by western blot analysis for LC3 levels. alpha-Tubulin (a-Tub) or GAPDH were used as loading controls.

### Other Embodiments

[0181] From the foregoing description, it will be apparent that variations and modifications may be made to the invention described herein to adopt it to various usages and conditions. Such embodiments are also within the scope of the following claims.

[0182] The recitation of a listing of elements in any definition of a variable herein includes definitions of that variable as any single element or combination (or subcombination) of listed elements. The recitation of an embodiment herein includes that embodiment as any single embodiment or in combination with any other embodiments or portions thereof.

[0183] All patents and publications mentioned in this specification are herein incorporated by reference to the same extent as if each independent patent and publication was specifically and individually indicated to be incorporated by reference.

The application's sequence listing, which the Patent Office published only in electronic form, follows.

SEQUENCE LISTING (2610 sequences)

SEQ ID NO: 1 - DNA, 1387 bp, Homo sapiens
ctctccctctccctctccctctccctctccctctccctctccctctcccctctttctacggtctccctctgttgccgaggctggactgtactgccgtgatctcggctcgctgcaacctccctgcctcgggctccagtgattctcctgcctcggcctgccgagtgcctgggattgcaggcacgcgccgccacgcctgactggtttttgtatttttggtggagacggggtttcgctgtgttgaccgggctggtctccagctcctggcctcgagtgatctgcccgcctcggcctcccgaggtgctgggattgcagacggagtctcgctcactcagtgctcaatgttgcccaggctggagtgcagtggcgtgatctcggctcgctacaacctccacctcccagccgcctgccttggcctcccaaagtgctaagattgcagcctctgcccggccgccaccccgtctgggaagtgaggagcgtctctgcctggccgcccatcgtctgggatgtgaggagcccctctgcccggccgccccgtctgggaagtgaggagcgcctctgcccggccgccaccccgtctgggaagtgaggagcgtctctgcccggccgcccatcgtctgggatgtgaggagcgcctctgcccggccgccccgtctgggatgtgaggagcgcctctgcccggccagccgccccgtctgggaggtgggggggtcagccccccgcccggccagccgccccgtctgggaggaggtgggggggtcagccccccgcccggccagccgccccgtctgggaggtgaggggcgcctctgcccggccgccccttctgggaagtgaggagcccctctgcccggccaccgccccgtctgggaggtgtacccagcgaccattgagaacgggccatgatgacgatggcggttttgtcgaaaagaaaagggggaaatgtggggaaaagaaagagagatcagattgttactgtgtctgtgtagaaagaagtagacataggagactccattttgttctgtactaagaaaaattcttctgccttgggatgctgttaatctataaccttacccccaaccccgtgctctctgaaacatgtgctgtgtcaactcagggttaaatggattaagggcggtgcaagatgtgctttgttaaacagatgcttgaaggcagcatgctcgttaagagtcatcaccactccctaatctcaagtacccagggacacaaacactgcggaaggccgcagggacctctgcctaggaaaaccagagacctttgttcacgtgtttatctgctgaccttctctccactattatcctatgaccctgccacatccccctctccgagaaacacccaagaatgatcaataaatactaaaaaaaaaaaaa

SEQ ID NO: 2 - DNA, 1383 bp, Homo sapiens
ctctccctctccctctccctctccctctccctctccctctccctgtcccctctttccacggtctccctctgatgccgagccgaggctggactgtactgccgccatctcggctcactgcaacctccctgcctgattctcctgcctcagcctgccgagtgcctgggattgcaggcgcgcgccgccacgcctgactggtttttgtattttttggtggagacggggtttcgccgtgttggccgggctggtctccagctcctgaccgcgagtgatctgcccgcctcggcctcccgaggtgccgggattgcagacggagtctcgctcactcagtgctcaatgttgcccaggctggagtgcagtggcgtgatctcggctcgctacaacctccacctcccagccgcctgccttggcctcccaaagtgccgagattgcagcctctgcccggccgccaccccgtctgggaagtgaggagcgtctctgcctggccgcccatcgtctgggatgtgaggagcccctctgcccggccgcccagtctgggaagtgaggagcgcctcttcccggccgccatcccgtctgggaagtgaggagcgtctctgcccggccgcccatcgtctgggatgtggggagcgcctctgccccgccgccccgtctgggatgtgaggagcgcctctgcccggccagccgccccgtctgggaggtgggggggtcagccccccgcccggccagccgccccgtccgggaggaggtgggggggtcagccccccgcccggccagccgccccgtctgggaggtggggggcgcctctgcccggccgccccgtctgggaagtgaggagcccctctgcccggccgccaccccgtctgggaggtgtacccaacagctcattgagaacgggccatgatgacgatggcggttttgtcgaatagaaaagggggaaatgtggggaaaagaaagagagatcagattgttactgtgtctgtgtagaaagaagtagacataggagactccattttgttctgtactaagaaaaattcttctgccttgggatgctgttaatctataaccttacccccaaccccgtgctctctgaaacatgtgctgtgtccactcagggttaaatggattaagggcggtgcaagatgtgctttgttaaacagatgcttgaaggcagcatgctcgttaagagtcatcaccactccctaatctcaagtacccagggacacaaacactgcggaaggccgcagggtcctctgcctaggaaaaccagagacctttgttcacatgtttatctgctgaccttccctccactattgtcctatgaccctgccaaatccccctctccgagaaacacccaagaatgatcaataaatactaaaaaaaaaaaaa

SEQ ID NO: 3 - DNA, 1384 bp, Homo sapiens
ctctccctctccctctccctctccctctccctctccctctccctctcccctctttccacggtctccctctgatgccgagccgaagctggactgtactgctgccatctcggctcactgcaacctccctgcctgattctcctgcctcagcctgccgagtgcctgcgattgcaggcgcgcgccgccacgcctgactggttttcgtatttttttggtggagacggggtttcgctgtgttggccgggctggtctccagctcctaaccgcgagtgatccgccagcctcggcctcccgaggtgccgggattgcagacggagtctcgttcactcagtgctcaatgttgcccaggctggagtgcagtggcgtgatctcggctcgctacaacctccacctcccagccgcctgccttggcctcccaaagtgccgagattgcagcctctgcccggccgccaccccgtctgggaagtgaggagcgtctctgcctggccgcccatcgtctgggatgtgaggagcccctctgcctggctgcccagtctgggaagtgaggagcgcctcttcccggccgccatcccgtctaggaagtgaggagcgtctctgcccggccgcccatcgtctgagatgtggggagcgcctctgccccgccgccccgtctgggatgtgaggagcgcctctgcccggccagccgccccgtctgggaggtgggggggtcagccccccgcccggccagccgccccgtccgggaggaggtgggggggtcagccccccgcccggccagccgccccgtccgggaggtggggggcgcctctgcccggccgccccttctgggaagtgaggagcccctctgcccggccaccaccccgtctgggaggtgtacccaacagctcattgagaacgggccatgatgacgatggcggttttgtggaatagaaaggggggaaaggtggggaaaagatagagaaatcggattgttgctgtgtctgtgtagaaagaagtagacatgggagacttcattttgttctgtactaagaaaaattcttctgccttgggatgctgttgatctgtgaccttacccccaaccctgtgctctctgaaacatgtgctgtgtccactcagggttaaatggattaagggcggtgcaagatgtgctttgttaaacagatgcttgaaggcagcatgctcgttaagagtcatcaccactccctaatctcaagtacccagggacacaaacactgcggaaggccgcagggtcctctgcctaggaaaaccagagacctttgttcacttgtttatctgctgaccttccctccactattgtcctatgaccctgccaaatccccctctgcgagaaacacccaagaatgatcaataaaaaaaaaaaaaaaaaaaa

SEQ ID NO: 4 - DNA, 1386 bp, Homo sapiens
ctctccctctccctctccctctccctctccctctccctctccctctcccctctttccacggtctccctctgatgccgagccgaagctggactgtactgctgccatctcggctcactgcaacctccctgcctgattctcctgcctcagcctgccgagtgcctgcgattgcaggcgcgcgccgccacgcctgactggttttcgtatttttttggtggagacggggtttcgctgtgttggccgggctggtctccagctcctaaccgcgagtgatccgccagcctcggcctcccgaggtgccgggattgcagacggagtctggttcactcagtgctcaatggtgcccaggctggagtgcagtggcgtgatctcggctcgctacaacctccacctcccagccgcctgccttggcctcccaaagtgccgagattgcagcctctgcccggccgccaccccgtctgggaagtgaggagcgtctctgcctggccgcccatcgtctgggatgtgaggagcccctctgcctggctgcccagtctgggaagtgaggagcgtctctgcccggccgccatcccatctaggaagtgaggagcgtctctgcccggccgcccatcgtctgagatgtggggagcgcctctgccccgccgccccgtctgggatgtgaggagcgcctctgcccggccagccgccccgtctgggaggtgggggggtcagccccccgcccggccagccgccccgtccgggaggaggtgggggggtcagccccccgcccggccagccgccccgtccgggaggtgaggggcgcctctgcccggccgcccctactgggaagtgaggagcccctctgcccggccaccaccccgtctgggaggtgtacccaacagctcattgagaacgggccatgatgacaatggcggttttgtggaatagaaaggggggaaaggtggggaaaagattgagaaatcggatggttgccgtgtctgtgtagaaagaggtagacatgggagacttttcattttgttctgtactaagaaaaattcttctgccttgggatcctgttgatctgtgaccttacccccaaccctgtgctctctgaaacatgtgctgtgtccactcagggttaaatggattaagggcggtgcaagatgtgctttgttaaacagatgcttgaaggcagcatgctcgttaagagtcatcaccactccctaatctcaagtacccagggacacaaacactgcggaaggccgcagggtcctctgcctaggaaaaccagagacctttgttcacttgtttatctgctgaccttccctccactattgtcctatgaccctgccaaatccccctctgcgagaaacacccaagaatgatcaataaaaaaaaaaaaaaaaaaaa

SEQ ID NO: 5 - DNA, 1382 bp, Homo sapiens
ctctccctctccctctccctctccctctccctctccctctccctctcccctctctccacggtctccctctgatgccgagccaaagctggacggtactgctgccatctcggctcactgcaacctccctgcctgattctcctgcctcagcctgccgagtgcctgcgattgcaggcgcgcgccgccacgcctgactggttttcgtttttttttggtggagacggggtttcgctgtgttggccgggctggtctccagctcctaaccgcgagtgatccgccagcctcggcctcccgaggtgccgggattgcagacggagtctcgttcactcagtgctcaatggtgcccaggctggagtgcagtggcgtgatctcggctcgctacaaccacctcccagccgcctgccttggcctcccaaagagccggattgcagcctctgcccggccgccaccccgtctgggaagtgaggagcgtctctgcctggccgcccatcgtctgggatgtgaggagcccctctgcctggccgcccagtctgggaagtgaggagcgcctctgcccggccgccatcccgtctgggaagtgaggagcgtctctgcccggccgcccatcgtctgggatgtggggagcacctctgccccgccgccccgtctgggatgtgaggagcgcctctgcccggccagccgccccgtccgggaggtgggggggtcagccccccgcccggccagccgccccgtccgggaggaggtgggggggtcagccccccgcccggccagccgccccgtccgggaggtgaggggcgcctctgcccggccgcccctactgggaagtgaggagcccctctgcccggccaccgccccgtctgggaggtgtgcccagcggctcattggggatgggccatgatgacaatggcggttttgtggaatagaaaggcgggaagggtggggaaaaaattgagaaatcggatggttgccgggtctgtgtggatagaagtagacatgggagacttttcattttgttctgtactaagaaaaattcttctgccttgggatcctgttgatctgtgaccttatccccaaccctgtgctctctgaaacatgtgctgtgtccactcagggttaaatggattaagggcggtgcaagatgtgctttgttaaacagatgcttgaaggcagcatgctcgttaagagtcatcaccactccctaatcttaagtacccagggacacaaacactgcggaaggccgcagggtcctctgcctaggaaaaccagagacctttgttcacttgtttatctgctgaccttccctccactattgtcctatgaccctgccaaatccccctctgcgagaaacacccaagaatgatcaataaaaaaaaaaaaaaaaaaaa

SEQ ID NO: 6 - DNA, 1375 bp, Homo sapiens
ctctccctctccctctccctctccctctccctctccctctccctctcccctctttccacggtctccctctcatgcggagccgaagctggactgtactgctgccatctcggctcactgcaacctccctgcctgattctcctgcctcagcctgccgagtgcctgcgattgcaggcacgcgccgccacgcctgactggttttggtggagacggggtttcgctgtgttggccgggccggtctccagcccctaaccgcgagtgatccgccagcctcggcctcccgaggtgccgggattgcagacggagtctcgttcactcagtgctcaatggtgcccaggctggagtgcagtggcgtgatctcggctcgctacaacctacacctcccagccgcctgccttggcctcccaaagtgccgagattgcagcctctgcccggccgccaccccgtctgggaagtgaggagcgtctctgcctggccgcccatcgtctgggatgtgaggagcccctctgcccggccgcccagtctgggaagtgaggagcgcctccgcccggccgccatcccgtctgggaagtgaggagcgtctctgcccggccgcccatcgtctgagatgtggggagcgcctctgccccgccgccccgtctgggatgtgaggagcgcctctgcccggccagccgccccgtctgggaggtgggggggtcagccccccgcccggccagccgccccgtccgggaggaggtgggggggtcagccccccgcccggccagccgccccgtccgggaggtgaggggcgcctctgcccggccgcccctactgggaagtgaggagcccctctgcccggccaccaccccgtctgggaggtgtgcccaacagctcattgagaacgggccaggatgacaatggcggctttgtggaatagaaaggcgggaaaggtggggaaaagattgagaaatcggatggttgccgtgtctgtgtagaaagaagtagacatgggagacttttcattttgttctgtactaagaaaaattcttctgccttgggatcctgttgatctgtgaccttacccccaaccctgtgctctctgaaacatgtgctgtgtccactcagggttaaatggattaagggcggtgcaagatgtgctttgttaaacagatgcttgaaggcagcatgctcgttaagagtcatcaccactccctaatctcaagtaatcagggacacaaacactgcggaaggccgcagggtcctctgcctaggaaaaccagagacctttgttcacttgtttatctgctgaccttccctccactattgtcccatgaccctgccaaatccccctctgtgagaaacacccaagaattatcaataaaaaaaattaaaaaaaaaa

SEQ ID NO: 7 - DNA, 15 bp, Artificial Sequence
  Description of Artificial Sequence: Synthetic oligonucleotide
gggaggtggggggcg

SEQ ID NO: 8 - DNA, 15 bp, Artificial Sequence
  Description of Artificial Sequence: Synthetic oligonucleotide
ctgaccttccctcca

SEQ ID NO: 9 - DNA, 15 bp, Artificial Sequence
  Description of Artificial Sequence: Synthetic oligonucleotide
gtcctctgcctagga

SEQ ID NO: 10 - DNA, 15 bp, Artificial Sequence
  Description of Artificial Sequence: Synthetic oligonucleotide
ggaagtgaggagccc

SEQ ID NO: 11 - DNA, 15 bp, Artificial Sequence
  Description of Artificial Sequence: Synthetic oligonucleotide
tactaaaaaaaaaaa

SEQ ID NO: 12 - DNA, 15 bp, Artificial Sequence
  Description of Artificial Sequence: Synthetic oligonucleotide
gggatgctgttaatc

SEQ ID NO: 13 - DNA, 15 bp, Artificial Sequence
  Description of Artificial Sequence: Synthetic oligonucleotide
cacgcgccgccacgc

SEQ ID NO: 14 - DNA, 15 bp, Artificial Sequence
  Description of Artificial Sequence: Synthetic oligonucleotide
tctccagctcctgac

SEQ ID NO: 15 - DNA, 15 bp, Artificial Sequence
  Description of Artificial Sequence: Synthetic oligonucleotide
cgtccgggaggtggg

SEQ ID NO: 16 - DNA, 15 bp, Artificial Sequence
  Description of Artificial Sequence: Synthetic oligonucleotide
ctgtgttggccgggc

SEQ ID NO: 17 - DNA, 15 bp, Artificial Sequence
  Description of Artificial Sequence: Synthetic oligonucleotide
tctctgcctggccgc

SEQ ID NO: 18 - DNA, 15 bp, Artificial Sequence
  Description of Artificial Sequence: Synthetic oligonucleotide
gattgcaggcgcgcg

SEQ ID NO: 19 - DNA, 15 bp, Artificial Sequence
  Description of Artificial Sequence: Synthetic oligonucleotide
tggggaaaagataga

SEQ ID NO: 20 - DNA, 15 bp, Artificial Sequence
  Description of Artificial Sequence: Synthetic oligonucleotide
tgcccaggctggagt

SEQ ID NO: 21 - DNA, 15 bp, Artificial Sequence
  Description of Artificial Sequence: Synthetic oligonucleotide
atgacaatggcggtt

SEQ ID NO: 22 - DNA, 15 bp, Artificial Sequence
  Description of Artificial Sequence: Synthetic oligonucleotide
ggttttcgttttttt

SEQ ID NO: 23 - DNA, 15 bp, Artificial Sequence
  Description of Artificial Sequence: Synthetic oligonucleotide
ggcgcctctgcccgg

SEQ ID NO: 24 - DNA, 15 bp, Artificial Sequence
  Description of Artificial Sequence: Synthetic oligonucleotide
aacgggccaggatga

SEQ ID NO: 25 - DNA, 15 bp, Artificial Sequence
  Description of Artificial Sequence: Synthetic oligonucleotide
gcgcctctgcccggc

SEQ ID NO: 26 - DNA, 15 bp, Artificial Sequence
  Description of Artificial Sequence: Synthetic oligonucleotide
tccgggaggtgaggg

SEQ ID NO: 27 - DNA, 15 bp, Artificial Sequence
  Description of Artificial Sequence: Synthetic oligonucleotide
ctaaaaaaaaaaaaa

SEQ ID NO: 28 - DNA, 15 bp, Artificial Sequence
  Description of Artificial Sequence: Synthetic oligonucleotide
ccgtgttggccgggc

SEQ ID NO: 29 - DNA, 15 bp, Artificial Sequence
  Description of Artificial Sequence: Synthetic oligonucleotide
aataaaaaaaattaa

SEQ ID NO: 30 - DNA, 15 bp, Artificial Sequence
  Description of Artificial Sequence: Synthetic oligonucleotide
gccagcctcggcctc

SEQ ID NO: 31 - DNA, 15 bp, Artificial Sequence
  Description of Artificial Sequence: Synthetic oligonucleotide
ggccaccaccccgtc

SEQ ID NO: 32 - DNA, 15 bp, Artificial Sequence
  Description of Artificial Sequence: Synthetic oligonucleotide
atgatgacaatggcg

SEQ ID NO: 33 - DNA, 15 bp, Artificial Sequence
  Description of Artificial Sequence: Synthetic oligonucleotide
ctaatcttaagtacc

SEQ ID NO: 34 - DNA, 15 bp, Artificial Sequence
  Description of Artificial Sequence: Synthetic oligonucleotide
atgccgagccgaggc

SEQ ID NO: 35 - DNA, 15 bp, Artificial Sequence
  Description of Artificial Sequence: Synthetic oligonucleotide
ctcgctacaacctcc

SEQ ID NO: 36 - DNA, 15 bp, Artificial Sequence
  Description of Artificial Sequence: Synthetic oligonucleotide
tgatgccgagccaaa

SEQ ID NO: 37 - DNA, 15 bp, Artificial Sequence
  Description of Artificial Sequence: Synthetic oligonucleotide
cacgcctgactggtt

SEQ ID NO: 38 - DNA, 15 bp, Artificial Sequence
  Description of Artificial Sequence: Synthetic oligonucleotide
ggaaaagattgagaa

SEQ ID NO: 39 - DNA, 15 bp, Artificial Sequence
  Description of Artificial Sequence: Synthetic oligonucleotide
ctgccttggcctccc

SEQ ID NO: 40 - DNA, 15 bp, Artificial Sequence
  Description of Artificial Sequence: Synthetic oligonucleotide
gctgaccttctctcc

SEQ ID NO: 41 - DNA, 15 bp, Artificial Sequence
  Description of Artificial Sequence: Synthetic oligonucleotide
gcccaggctggagtg

SEQ ID NO: 42 - DNA, 15 bp, Artificial Sequence
  Description of Artificial Sequence: Synthetic oligonucleotide
gtttcgctgtgttga

SEQ ID NO: 43 - DNA, 15 bp, Artificial Sequence
  Description of Artificial Sequence: Synthetic oligonucleotide
ctccattttgttctg

SEQ ID NO: 44 - DNA, 15 bp, Artificial Sequence
  Description of Artificial Sequence: Synthetic oligonucleotide
gtttcgctgtgttgg

SEQ ID NO: 45 - DNA, 15 bp, Artificial Sequence
  Description of Artificial Sequence: Synthetic oligonucleotide
ctctccactattatc

SEQ ID NO: 46 - DNA, 15 bp, Artificial Sequence
  Description of Artificial Sequence: Synthetic oligonucleotide
gtctgtgtggataga

SEQ ID NO: 47 - DNA, 15 bp, Artificial Sequence
  Description of Artificial Sequence: Synthetic oligonucleotide
tttcgtatttttttg

SEQ ID NO: 48 - DNA, 15 bp, Artificial Sequence
  Description of Artificial Sequence: Synthetic oligonucleotide
ctttgttcacttgtt

SEQ ID NO: 49 - DNA, 15 bp, Artificial Sequence
  Description of Artificial Sequence: Synthetic oligonucleotide
acaacctacacctcc

SEQ ID NO: 50 - DNA, 15 bp, Artificial Sequence
  Description of Artificial Sequence: Synthetic oligonucleotide
gtgattctcctgcct

SEQ ID NO: 51 - DNA, 15 bp, Artificial Sequence
  Description of Artificial Sequence: Synthetic oligonucleotide
ggttaaatggattaa

SEQ ID NO: 52 - DNA, 15 bp, Artificial Sequence
  Description of Artificial Sequence: Synthetic oligonucleotide
ctgccaaatccccct

SEQ ID NO: 53 - DNA, 15 bp, Artificial Sequence
  Description of Artificial Sequence: Synthetic oligonucleotide
cctaaccgcgagtga

SEQ ID NO: 54 - DNA, 15 bp, Artificial Sequence
  Description of Artificial Sequence: Synthetic oligonucleotide
caactcagggttaaa

SEQ ID NO: 55 - DNA, 15 bp, Artificial Sequence
  Description of Artificial Sequence: Synthetic oligonucleotide
aaagtgccgagattg

SEQ ID NO: 56 - DNA, 15 bp, Artificial Sequence
  Description of Artificial Sequence: Synthetic oligonucleotide
agaatgatcaataaa

SEQ ID NO: 57 - DNA, 15 bp, Artificial Sequence
  Description of Artificial Sequence: Synthetic oligonucleotide
tgaccttatccccaa

SEQ ID NO: 58 - DNA, 15 bp, Artificial Sequence
  Description of Artificial Sequence: Synthetic oligonucleotide
tctgctgaccttctc

SEQ ID NO: 59 - DNA, 15 bp, Artificial Sequence
  Description of Artificial Sequence: Synthetic oligonucleotide
aaaggcgggaaaggt

SEQ ID NO: 60 - DNA, 15 bp, Artificial Sequence
  Description of Artificial Sequence: Synthetic oligonucleotide
ggtctgtgtggatag

SEQ ID NO: 61 - DNA, 15 bp, Artificial Sequence
  Description of Artificial Sequence: Synthetic oligonucleotide
acggtctccctctca

SEQ ID NO: 62 - DNA, 15 bp, Artificial Sequence
  Description of Artificial Sequence: Synthetic oligonucleotide
gtgatctcggctcgc

SEQ ID NO: 63 - DNA, 15 bp, Artificial Sequence
  Description of Artificial Sequence: Synthetic oligonucleotide
gtagaaagaggtaga

SEQ ID NO: 64 - DNA, 15 bp, Artificial Sequence
  Description of Artificial Sequence: Synthetic oligonucleotide
tctgcctggctgccc

SEQ ID NO: 65 - DNA, 15 bp, Artificial Sequence
  Description of Artificial Sequence: Synthetic oligonucleotide
cgattgcaggcgcgc

SEQ ID NO: 66 - DNA, 15 bp, Artificial Sequence
  Description of Artificial Sequence: Synthetic oligonucleotide
attgagaaatcggat

SEQ ID NO: 67 - DNA, 15 bp, Artificial Sequence
  Description of Artificial Sequence: Synthetic oligonucleotide
cgcctctgccccgcc

SEQ ID NO: 68 - DNA, 15 bp, Artificial Sequence
  Description of Artificial Sequence: Synthetic oligonucleotide
acccagcgaccattg

SEQ ID NO: 69 - DNA, 15 bp, Artificial Sequence
  Description of Artificial Sequence: Synthetic oligonucleotide
agcgtctctgcccgg

SEQ ID NO: 70 - DNA, 15 bp, Artificial Sequence
  Description of Artificial Sequence: Synthetic oligonucleotide
cctaatcttaagtac

SEQ ID NO: 71 - DNA, 15 bp, Artificial Sequence
  Description of Artificial Sequence: Synthetic oligonucleotide
aaagattgagaaatc

SEQ ID NO: 72 - DNA, 15 bp, Artificial Sequence
  Description of Artificial Sequence: Synthetic oligonucleotide
cgagtgatccgccag

SEQ ID NO: 73 - DNA, 15 bp, Artificial Sequence
  Description of Artificial Sequence: Synthetic oligonucleotide
ccatctaggaagtga

SEQ ID NO: 74 - DNA, 15 bp, Artificial Sequence
  Description of Artificial Sequence: Synthetic oligonucleotide
gaaagaggtagacat

SEQ ID NO: 75 - DNA, 15 bp, Artificial Sequence
  Description of Artificial Sequence: Synthetic oligonucleotide
ttggccgggccggtc

SEQ ID NO: 76 - DNA, 15 bp, Artificial Sequence
  Description of Artificial Sequence: Synthetic oligonucleotide
ggagacggggtttcg

SEQ ID NO: 77 - DNA, 15 bp, Artificial Sequence
  Description of Artificial Sequence: Synthetic oligonucleotide
ccgcgagtgatccgc

SEQ ID NO: 78 - DNA, 15 bp, Artificial Sequence
  Description of Artificial Sequence: Synthetic oligonucleotide
tagaaaggggggaaa

SEQ ID NO: 79 - DNA, 15 bp, Artificial Sequence
  Description of Artificial Sequence: Synthetic oligonucleotide
gcctcttcccggccg

SEQ ID NO: 80 - DNA, 15 bp, Artificial Sequence
  Description of Artificial Sequence: Synthetic oligonucleotide
aaagatagagaaatc

SEQ ID NO: 81 - DNA, 15 bp, Artificial Sequence
  Description of Artificial Sequence: Synthetic oligonucleotide
gccggtctccagccc

SEQ ID NO: 82 - DNA, 15 bp, Artificial Sequence
  Description of Artificial Sequence: Synthetic oligonucleotide
cggttttgtcgaaaa

SEQ ID NO: 83 - DNA, 15 bp, Artificial Sequence
  Description of Artificial Sequence: Synthetic oligonucleotide
ctttgttaaacagat

SEQ ID NO: 84 - DNA, 15 bp, Artificial Sequence
  Description of Artificial Sequence: Synthetic oligonucleotide
cagctcctaaccgcg

SEQ ID NO: 85 - DNA, 15 bp, Artificial Sequence
  Description of Artificial Sequence: Synthetic oligonucleotide
ttcacttgtttatct

SEQ ID NO: 86 - DNA, 15 bp, Artificial Sequence
  Description of Artificial Sequence: Synthetic oligonucleotide
ctcgctacaaccacc

SEQ ID NO: 87 - DNA, 15 bp, Artificial Sequence
  Description of Artificial Sequence: Synthetic oligonucleotide
cctcccagccgcctg

SEQ ID NO: 88 - DNA, 15 bp, Artificial Sequence
  Description of Artificial Sequence: Synthetic oligonucleotide
tccctaatctcaagt

SEQ ID NO: 89 - DNA, 15 bp, Artificial Sequence
  Description of Artificial Sequence: Synthetic oligonucleotide
ctgcctgattctcct

SEQ ID NO: 90 - DNA, 15 bp, Artificial Sequence
  Description of Artificial Sequence: Synthetic oligonucleotide
tgcctgcgattgcag

SEQ ID NO: 91 - DNA, 15 bp, Artificial Sequence
  Description of Artificial Sequence: Synthetic oligonucleotide
gctcactcagtgctc

SEQ ID NO: 92 - DNA, 15 bp, Artificial Sequence
  Description of Artificial Sequence: Synthetic oligonucleotide
tctcggctcgctaca

SEQ ID NO: 93 - DNA, 15 bp, Artificial Sequence
  Description of Artificial Sequence: Synthetic oligonucleotide
gccgccatctcggct

SEQ ID NO: 94 - DNA, 15 bp, Artificial Sequence
  Description of Artificial Sequence: Synthetic oligonucleotide
gctcctaaccgcgag

SEQ ID NO: 95 - DNA, 15 bp, Artificial Sequence
  Description of Artificial Sequence: Synthetic oligonucleotide
taggaaaaccagaga

SEQ ID NO: 96 - DNA, 15 bp, Artificial Sequence
  Description of Artificial Sequence: Synthetic oligonucleotide
ctcgctcactcagtg

SEQ ID NO: 97 - DNA, 15 bp, Artificial Sequence
  Description of Artificial Sequence: Synthetic oligonucleotide
cctctttctacggtc

SEQ ID NO: 98 - DNA, 15 bp, Artificial Sequence
  Description of Artificial Sequence: Synthetic oligonucleotide
tcgctgcaacctccc

SEQ ID NO: 99 - DNA, 15 bp, Artificial Sequence
  Description of Artificial Sequence: Synthetic oligonucleotide
agcacctctgccccg

SEQ ID NO: 100 - DNA, 15 bp, Artificial Sequence
  Description of Artificial Sequence: Synthetic oligonucleotide
aagtgaggagcgtct

SEQ ID NO: 101 - DNA, 15 bp, Artificial Sequence
  Description of Artificial Sequence: Synthetic oligonucleotide
agggggaaatgtggg

SEQ ID NO: 102 - DNA, 15 bp, Artificial Sequence
  Description of Artificial Sequence: Synthetic oligonucleotide
gccttgggatcctgt

SEQ ID NO: 103 - DNA, 15 bp, Artificial Sequence
  Description of Artificial Sequence: Synthetic oligonucleotide
catctaggaagtgag

SEQ ID NO: 104 - DNA, 15 bp, Artificial Sequence
  Description of Artificial Sequence: Synthetic oligonucleotide
atctgtgaccttatc

SEQ ID NO: 105 - DNA, 15 bp, Artificial Sequence
  Description of Artificial Sequence: Synthetic oligonucleotide
gggggggtcagcccc

SEQ ID NO: 106 - DNA, 15 bp, Artificial Sequence
  Description of Artificial Sequence: Synthetic oligonucleotide
gtgtttatctgctga

SEQ ID NO: 107 - DNA, 15 bp, Artificial Sequence
  Description of Artificial Sequence: Synthetic oligonucleotide
ggaaaaccagagacc

SEQ ID NO: 108 - DNA, 15 bp, Artificial Sequence
  Description of Artificial Sequence: Synthetic oligonucleotide
gcatgctcgttaaga

SEQ ID NO: 109 - DNA, 15 bp, Artificial Sequence
  Description of Artificial Sequence: Synthetic oligonucleotide
aaaagattgagaaat

SEQ ID NO: 110 - DNA, 15 bp, Artificial Sequence
  Description of Artificial Sequence: Synthetic oligonucleotide
aagtgaggagcgcct

SEQ ID NO: 111 - DNA, 15 bp, Artificial Sequence
  Description of Artificial Sequence: Synthetic oligonucleotide
accttctctccacta

SEQ ID NO: 112 - DNA, 15 bp, Artificial Sequence
  Description of Artificial Sequence: Synthetic oligonucleotide
agacttttcattttg

SEQ ID NO: 113 - DNA, 15 bp, Artificial Sequence
  Description of Artificial Sequence: Synthetic oligonucleotide
ctcggctcgctacaa

SEQ ID NO: 114 - DNA, 15 bp, Artificial Sequence
  Description of Artificial Sequence: Synthetic oligonucleotide
ctccagcccctaacc

SEQ ID NO: 115 - DNA, 15 bp, Artificial Sequence
  Description of Artificial Sequence: Synthetic oligonucleotide
aggtagacatgggag

SEQ ID NO: 116 - DNA, 15 bp, Artificial Sequence
  Description of Artificial Sequence: Synthetic oligonucleotide
tcccgaggtgctggg

SEQ ID NO: 117 - DNA, 15 bp, Artificial Sequence
  Description of Artificial Sequence: Synthetic oligonucleotide
cctcgagtgatctgc

SEQ ID NO: 118 - DNA, 15 bp, Artificial Sequence
  Description of Artificial Sequence: Synthetic oligonucleotide
ggttcactcagtgct

SEQ ID NO: 119 - DNA, 15 bp, Artificial Sequence
  Description of Artificial Sequence: Synthetic oligonucleotide
cagcctcggcctccc

SEQ ID NO: 120 - DNA, 15 bp, Artificial Sequence
  Description of Artificial Sequence: Synthetic oligonucleotide
aaggccgcagggtcc

SEQ ID NO: 121 - DNA, 15 bp, Artificial Sequence
  Description of Artificial Sequence: Synthetic oligonucleotide
gtactaagaaaaatt

SEQ ID NO: 122 - DNA, 15 bp, Artificial Sequence
  Description of Artificial Sequence: Synthetic oligonucleotide
aagatgtgctttgtt

SEQ ID NO: 123 - DNA, 15 bp, Artificial Sequence
  Description of Artificial Sequence: Synthetic oligonucleotide
aatccccctctgcga

SEQ ID NO: 124 - DNA, 15 bp, Artificial Sequence
  Description of Artificial Sequence: Synthetic oligonucleotide
tgaccctgccacatc

SEQ ID NO: 125 - DNA, 15 bp, Artificial Sequence
  Description of Artificial Sequence: Synthetic oligonucleotide
gcctctgccccgccg

SEQ ID NO: 126 - DNA, 15 bp, Artificial Sequence
  Description of Artificial Sequence: Synthetic oligonucleotide
tgggatgtgaggagc

SEQ ID NO: 127 - DNA, 15 bp, Artificial Sequence
  Description of Artificial Sequence: Synthetic oligonucleotide
ttccacggtctccct

SEQ ID NO: 128 - DNA, 15 bp, Artificial Sequence
  Description of Artificial Sequence: Synthetic oligonucleotide
ctgcctaggaaaacc

SEQ ID NO: 129 - DNA, 15 bp, Artificial Sequence
  Description of Artificial Sequence: Synthetic oligonucleotide
ggccggtctccagcc

SEQ ID NO: 130 - DNA, 15 bp, Artificial Sequence
  Description of Artificial Sequence: Synthetic oligonucleotide
ccttatccccaaccc

SEQ ID NO: 131 - DNA, 15 bp, Artificial Sequence
  Description of Artificial Sequence: Synthetic oligonucleotide
cggctcactgcaacc

SEQ ID NO: 132 - DNA, 15 bp, Artificial Sequence
  Description of Artificial Sequence: Synthetic oligonucleotide
tctgcctggccgccc

SEQ ID NO: 133 - DNA, 15 bp, Artificial Sequence
  Description of Artificial Sequence: Synthetic oligonucleotide
tcgtttttttttggt

SEQ ID NO: 134 - DNA, 15 bp, Artificial Sequence
  Description of Artificial Sequence: Synthetic oligonucleotide
caatggcggttttgt

SEQ ID NO: 135 - DNA, 15 bp, Artificial Sequence
  Description of Artificial Sequence: Synthetic oligonucleotide
cgagaaacacccaag

SEQ ID NO: 136 - DNA, 15 bp, Artificial Sequence
  Description of Artificial Sequence: Synthetic oligonucleotide
gtgttgaccgggctg

SEQ ID NO: 137 - DNA, 15 bp, Artificial Sequence
  Description of Artificial Sequence: Synthetic oligonucleotide
agacggagtctcgct

SEQ ID NO: 138 - DNA, 15 bp, Artificial Sequence
  Description of Artificial Sequence: Synthetic oligonucleotide
ccctgccaaatcccc

SEQ ID NO: 139 - DNA, 15 bp, Artificial Sequence
  Description of Artificial Sequence: Synthetic oligonucleotide
ctcctgaccgcgagt

SEQ ID NO: 140 - DNA, 15 bp, Artificial Sequence
  Description of Artificial Sequence: Synthetic oligonucleotide
aggggggaaaggtgg

SEQ ID NO: 141 - DNA, 15 bp, Artificial Sequence
  Description of Artificial Sequence: Synthetic oligonucleotide
cccggccgcccctac

SEQ ID NO: 142 - DNA, 15 bp, Artificial Sequence
  Description of Artificial Sequence: Synthetic oligonucleotide
tcagtgctcaatgtt

SEQ ID NO: 143 - DNA, 15 bp, Artificial Sequence
  Description of Artificial Sequence: Synthetic oligonucleotide
gccgaggctggactg

SEQ ID NO: 144 - DNA, 15 bp, Artificial Sequence
  Description of Artificial Sequence: Synthetic oligonucleotide
tggcctcccaaagtg

SEQ ID NO: 145 - DNA, 15 bp, Artificial Sequence
  Description of Artificial Sequence: Synthetic oligonucleotide
ctcgagtgatctgcc

SEQ ID NO: 146 - DNA, 15 bp, Artificial Sequence
  Description of Artificial Sequence: Synthetic oligonucleotide
tcgttcactcagtgc

SEQ ID NO: 147 - DNA, 15 bp, Artificial Sequence
  Description of Artificial Sequence: Synthetic oligonucleotide
ctcccctctctccac

SEQ ID NO: 148 - DNA, 15 bp, Artificial Sequence
  Description of Artificial Sequence: Synthetic oligonucleotide
ccagcgaccattgag

SEQ ID NO: 149 - DNA, 15 bp, Artificial Sequence
  Description of Artificial Sequence: Synthetic oligonucleotide
ccaggatgacaatgg

SEQ ID NO: 150 - DNA, 15 bp, Artificial Sequence
  Description of Artificial Sequence: Synthetic oligonucleotide
ctgctgccatctcgg

SEQ ID NO: 151 - DNA, 15 bp, Artificial Sequence
  Description of Artificial Sequence: Synthetic oligonucleotide
tcccatctaggaagt

SEQ ID NO: 152 - DNA, 15 bp, Artificial Sequence
  Description of Artificial Sequence: Synthetic oligonucleotide
ccatgatgacgatgg

SEQ ID NO: 153 - DNA, 15 bp, Artificial Sequence
  Description of Artificial Sequence: Synthetic oligonucleotide
gcagggacctctgcc

SEQ ID NO: 154 - DNA, 15 bp, Artificial Sequence
  Description of Artificial Sequence: Synthetic oligonucleotide
cccggccgccccgtc

SEQ ID NO: 155 - DNA, 15 bp, Artificial Sequence
  Description of Artificial Sequence: Synthetic oligonucleotide
atcttaagtacccag

SEQ ID NO: 156 - DNA, 15 bp, Artificial Sequence
  Description of Artificial Sequence: Synthetic oligonucleotide
cagcgaccattgaga

SEQ ID NO: 157 - DNA, 15 bp, Artificial Sequence
  Description of Artificial Sequence: Synthetic oligonucleotide
ccgagtgcctgggat

SEQ ID NO: 158 - DNA, 15 bp, Artificial Sequence
  Description of Artificial Sequence: Synthetic oligonucleotide
aaaagaaagagagat

SEQ ID NO: 159 - DNA, 15 bp, Artificial Sequence
  Description of Artificial Sequence: Synthetic oligonucleotide
aggcgggaaaggtgg

SEQ ID NO: 160 - DNA, 15 bp, Artificial Sequence
  Description of Artificial Sequence: Synthetic oligonucleotide
ctgttgccgaggctg

SEQ ID NO: 161 - DNA, 15 bp, Artificial Sequence
  Description of Artificial Sequence: Synthetic oligonucleotide
tgggaggaggtgggg

SEQ ID NO: 162 - DNA, 15 bp, Artificial Sequence
  Description of Artificial Sequence: Synthetic oligonucleotide
gtctccctctcatgc

SEQ ID NO: 163 - DNA, 15 bp, Artificial Sequence
  Description of Artificial Sequence: Synthetic oligonucleotide
cctaatctcaagtac

SEQ ID NO: 164 - DNA, 15 bp, Artificial Sequence
  Description of Artificial Sequence: Synthetic oligonucleotide
ccagtctgggaagtg

SEQ ID NO: 165 - DNA, 15 bp, Artificial Sequence
  Description of Artificial Sequence: Synthetic oligonucleotide
cctaatctcaagtaa

SEQ ID NO: 166 - DNA, 15 bp, Artificial Sequence
  Description of Artificial Sequence: Synthetic oligonucleotide
tccgggaggaggtgg

SEQ ID NO: 167 - DNA, 15 bp, Artificial Sequence
  Description of Artificial Sequence: Synthetic oligonucleotide
cgggtctgtgtggat

SEQ ID NO: 168 - DNA, 15 bp, Artificial Sequence
  Description of Artificial Sequence: Synthetic oligonucleotide
caacctccacctccc

SEQ ID NO: 169 - DNA, 15 bp, Artificial Sequence
  Description of Artificial Sequence: Synthetic oligonucleotide
ggctttgtggaatag

SEQ ID NO: 170 - DNA, 15 bp, Artificial Sequence
  Description of Artificial Sequence: Synthetic oligonucleotide
ctgggatgtggggag

SEQ ID NO: 171 - DNA, 15 bp, Artificial Sequence
  Description of Artificial Sequence: Synthetic oligonucleotide
ctggtctccagctcc

SEQ ID NO: 172 - DNA, 15 bp, Artificial Sequence
  Description of Artificial Sequence: Synthetic oligonucleotide
tgggaagtgaggagc

SEQ ID NO: 173 - DNA, 15 bp, Artificial Sequence
  Description of Artificial Sequence: Synthetic oligonucleotide
ccctctgttgccgag

SEQ ID NO: 174 - DNA, 15 bp, Artificial Sequence
  Description of Artificial Sequence: Synthetic oligonucleotide
gtgaccttaccccca

SEQ ID NO: 175 - DNA, 15 bp, Artificial Sequence
  Description of Artificial Sequence: Synthetic oligonucleotide
cccaaagtgccgaga

SEQ ID NO: 176 - DNA, 15 bp, Artificial Sequence
  Description of Artificial Sequence: Synthetic oligonucleotide
ggattgcagcctctg

SEQ ID NO: 177 - DNA, 15 bp, Artificial Sequence
  Description of Artificial Sequence: Synthetic oligonucleotide
gtggggaaaagattg

SEQ ID NO: 178 - DNA, 15 bp, Artificial Sequence
  Description of Artificial Sequence: Synthetic oligonucleotide
gtgcagtggcgtgat

SEQ ID NO: 179 - DNA, 15 bp, Artificial Sequence
  Description of Artificial Sequence: Synthetic oligonucleotide
taagaaaaattcttc

SEQ ID NO: 180 - DNA, 15 bp, Artificial Sequence
  Description of Artificial Sequence: Synthetic oligonucleotide
tctgggaagtgagga

SEQ ID NO: 181 - DNA, 15 bp, Artificial Sequence
  Description of Artificial Sequence: Synthetic oligonucleotide
agtgctcaatggtgc

SEQ ID NO: 182 - DNA, 15 bp, Artificial Sequence
  Description of Artificial Sequence: Synthetic oligonucleotide
gtgctttgttaaaca

SEQ ID NO: 183 - DNA, 15 bp, Artificial Sequence
  Description of Artificial Sequence: Synthetic oligonucleotide
atcccatctaggaag

SEQ ID NO: 184 - DNA, 15 bp, Artificial Sequence
  Description of Artificial Sequence: Synthetic oligonucleotide
ctgccccgccgcccc

SEQ ID NO: 185 - DNA, 15 bp, Artificial Sequence
  Description of Artificial Sequence: Synthetic oligonucleotide
gcctcggcctgccga

SEQ ID NO: 186 - DNA, 15 bp, Artificial Sequence
  Description of Artificial Sequence: Synthetic oligonucleotide
cctgccaaatccccc

SEQ ID NO: 187 - DNA, 15 bp, Artificial Sequence
  Description of Artificial Sequence: Synthetic oligonucleotide
ctccctaatctcaag

SEQ ID NO: 188 - DNA, 15 bp, Artificial Sequence
  Description of Artificial Sequence: Synthetic oligonucleotide
cccaaagtgctaaga

SEQ ID NO: 189 - DNA, 15 bp, Artificial Sequence
  Description of Artificial Sequence: Synthetic oligonucleotide
gccccgccgccccgt

SEQ ID NO: 190 - DNA, 15 bp, Artificial Sequence
  Description of Artificial Sequence: Synthetic oligonucleotide
atgggagacttcatt

SEQ ID NO: 191 - DNA, 15 bp, Artificial Sequence
  Description of Artificial Sequence: Synthetic oligonucleotide
gtgcccaggctggag

SEQ ID NO: 192 - DNA, 15 bp, Artificial Sequence
  Description of Artificial Sequence: Synthetic oligonucleotide
gccccgtctgggaag

SEQ ID NO: 193 - DNA, 15 bp, Artificial Sequence
  Description of Artificial Sequence: Synthetic oligonucleotide
agcgcctccgcccgg

SEQ ID NO: 194 - DNA, 15 bp, Artificial Sequence
  Description of Artificial Sequence: Synthetic oligonucleotide
atccgccagcctcgg

SEQ ID NO: 195 - DNA, 15 bp, Artificial Sequence
  Description of Artificial Sequence: Synthetic oligonucleotide
catgggagacttttc

SEQ ID NO: 196 - DNA, 15 bp, Artificial Sequence
  Description of Artificial Sequence: Synthetic oligonucleotide
gggtttcgccgtgtt

SEQ ID NO: 197 - DNA, 15 bp, Artificial Sequence
  Description of Artificial Sequence: Synthetic oligonucleotide
cctactgggaagtga

SEQ ID NO: 198 - DNA, 15 bp, Artificial Sequence
  Description of Artificial Sequence: Synthetic oligonucleotide
atgtggggaaaagaa

SEQ ID NO: 199 - DNA, 15 bp, Artificial Sequence
  Description of Artificial Sequence: Synthetic oligonucleotide
atgggccatgatgac

SEQ ID NO: 200 - DNA, 15 bp, Artificial Sequence
  Description of Artificial Sequence: Synthetic oligonucleotide
gccgccaccccgtct

SEQ ID NO: 201 - DNA, 15 bp, Artificial Sequence
  Description of Artificial Sequence: Synthetic oligonucleotide
ggcacgcgccgccac

SEQ ID NO: 202 - DNA, 15 bp, Artificial Sequence
  Description of Artificial Sequence: Synthetic oligonucleotide
tgtgaggagcgcctc

SEQ ID NO: 203 - DNA, 15 bp, Artificial Sequence
  Description of Artificial Sequence: Synthetic oligonucleotide
accgcgagtgatccg

SEQ ID NO: 204 - DNA, 15 bp, Artificial Sequence
  Description of Artificial Sequence: Synthetic oligonucleotide
gctgcaacctccctg

SEQ ID NO: 205 - DNA, 15 bp, Artificial Sequence
  Description of Artificial Sequence: Synthetic oligonucleotide
cccaagaattatcaa

SEQ ID NO: 206 - DNA, 15 bp, Artificial Sequence
  Description of Artificial Sequence: Synthetic oligonucleotide
gccaaatccccctct

SEQ ID NO: 207 - DNA, 15 bp, Artificial Sequence
  Description of Artificial Sequence: Synthetic oligonucleotide
ttcgctgtgttggcc

SEQ ID NO: 208 - DNA, 15 bp, Artificial Sequence
  Description of Artificial Sequence: Synthetic oligonucleotide
ctgtgaccttatccc

SEQ ID NO: 209 - DNA, 15 bp, Artificial Sequence
  Description of Artificial Sequence: Synthetic oligonucleotide
gcaacctccctgcct

SEQ ID NO: 210 - DNA, 15 bp, Artificial Sequence
  Description of Artificial Sequence: Synthetic oligonucleotide
cgaggtgctgggatt

SEQ ID NO: 211 - DNA, 15 bp, Artificial Sequence
  Description of Artificial Sequence: Synthetic oligonucleotide
cgcgagtgatccgcc

SEQ ID NO: 212 - DNA, 15 bp, Artificial Sequence
  Description of Artificial Sequence: Synthetic oligonucleotide
gaaaagaaaaggggg

SEQ ID NO: 213 - DNA, 15 bp, Artificial Sequence
  Description of Artificial Sequence: Synthetic oligonucleotide
attgttgctgtgtct

SEQ ID NO: 214 - DNA, 15 bp, Artificial Sequence
  Description of Artificial Sequence: Synthetic oligonucleotide
accgccccgtctggg

SEQ ID NO: 215 - DNA, 15 bp, Artificial Sequence
  Description of Artificial Sequence: Synthetic oligonucleotide
tgatccgccagcctc

SEQ ID NO: 216 - DNA, 15 bp, Artificial Sequence
  Description of Artificial Sequence: Synthetic oligonucleotide
tgattctcctgcctc

SEQ ID NO: 217 - DNA, 15 bp, Artificial Sequence
  Description of Artificial Sequence: Synthetic oligonucleotide
cagctcctgaccgcg

SEQ ID NO: 218 - DNA, 15 bp, Artificial Sequence
  Description of Artificial Sequence: Synthetic oligonucleotide
gtgctcaatgttgcc

SEQ ID NO: 219 - DNA, 15 bp, Artificial Sequence
  Description of Artificial Sequence: Synthetic oligonucleotide
gaggaggtggggggg

SEQ ID NO: 220 - DNA, 15 bp, Artificial Sequence
  Description of Artificial Sequence: Synthetic oligonucleotide
gctcctgaccgcgag

SEQ ID NO: 221 - DNA, 15 bp, Artificial Sequence
  Description of Artificial Sequence: Synthetic oligonucleotide
tgctcaatgttgccc

SEQ ID NO: 222 - DNA, 15 bp, Artificial Sequence
  Description of Artificial Sequence: Synthetic oligonucleotide
gtgcccagcggctca

SEQ ID NO: 223 - DNA, 15 bp, Artificial Sequence
  Description of Artificial Sequence: Synthetic oligonucleotide
cctccctgcctgatt

SEQ ID NO: 224 - DNA, 15 bp, Artificial Sequence
  Description of Artificial Sequence: Synthetic oligonucleotide
gccgagtgcctgcga

SEQ ID NO: 225 - DNA, 15 bp, Artificial Sequence
  Description of Artificial Sequence: Synthetic oligonucleotide
tctgtgaccttaccc

SEQ ID NO: 226 - DNA, 15 bp, Artificial Sequence
  Description of Artificial Sequence: Synthetic oligonucleotide
acctcccagccgcct

SEQ ID NO: 227 - DNA, 15 bp, Artificial Sequence
  Description of Artificial Sequence: Synthetic oligonucleotide
aaaattcttctgcct

SEQ ID NO: 228 - DNA, 15 bp, Artificial Sequence
  Description of Artificial Sequence: Synthetic oligonucleotide
agtctggttcactca

SEQ ID NO: 229 - DNA, 15 bp, Artificial Sequence
  Description of Artificial Sequence: Synthetic oligonucleotide
tttgtattttttggt

SEQ ID NO: 230 - DNA, 15 bp, Artificial Sequence
  Description of Artificial Sequence: Synthetic oligonucleotide
attgtcctatgaccc

SEQ ID NO: 231 - DNA, 15 bp, Artificial Sequence
  Description of Artificial Sequence: Synthetic oligonucleotide
aatctcaagtaccca

SEQ ID NO: 232 - DNA, 15 bp, Artificial Sequence
  Description of Artificial Sequence: Synthetic oligonucleotide
ttgctgtgtctgtgt

SEQ ID NO: 233 - DNA, 15 bp, Artificial Sequence
  Description of Artificial Sequence: Synthetic oligonucleotide
ccgcctgccttggcc

SEQ ID NO: 234 - DNA, 15 bp, Artificial Sequence
  Description of Artificial Sequence: Synthetic oligonucleotide
ccgaggtgccgggat

SEQ ID NO: 235 - DNA, 15 bp, Artificial Sequence
  Description of Artificial Sequence: Synthetic oligonucleotide
aagagagatcagatt

SEQ ID NO: 236 - DNA, 15 bp, Artificial Sequence
  Description of Artificial Sequence: Synthetic oligonucleotide
gcccggccaccaccc

SEQ ID NO: 237 - DNA, 15 bp, Artificial Sequence
  Description of Artificial Sequence: Synthetic oligonucleotide
gggtggggaaaaaat

SEQ ID NO: 238 - DNA, 15 bp, Artificial Sequence
  Description of Artificial Sequence: Synthetic oligonucleotide
tccacggtctccctc

SEQ ID NO: 239 - DNA, 15 bp, Artificial Sequence
  Description of Artificial Sequence: Synthetic oligonucleotide
gtctccagcccctaa

SEQ ID NO: 240 - DNA, 15 bp, Artificial Sequence
  Description of Artificial Sequence: Synthetic oligonucleotide
gcctgggattgcagg

SEQ ID NO: 241 - DNA, 15 bp, Artificial Sequence
  Description of Artificial Sequence: Synthetic oligonucleotide
cgggaggtgaggggc

SEQ ID NO: 242 - DNA, 15 bp, Artificial Sequence
  Description of Artificial Sequence: Synthetic oligonucleotide
cctcccaaagagccg

SEQ ID NO: 243 - DNA, 15 bp, Artificial Sequence
  Description of Artificial Sequence: Synthetic oligonucleotide
tggacggtactgctg

SEQ ID NO: 244 - DNA, 15 bp, Artificial Sequence
  Description of Artificial Sequence: Synthetic oligonucleotide
ccccctctgtgagaa

SEQ ID NO: 245 - DNA, 15 bp, Artificial Sequence
  Description of Artificial Sequence: Synthetic oligonucleotide
gaggtgctgggattg

SEQ ID NO: 246 - DNA, 15 bp, Artificial Sequence
  Description of Artificial Sequence: Synthetic oligonucleotide
gagtcatcaccactc

SEQ ID NO: 247 - DNA, 15 bp, Artificial Sequence
  Description of Artificial Sequence: Synthetic oligonucleotide
aaaccagagaccttt

SEQ ID NO: 248 - DNA, 15 bp, Artificial Sequence
  Description of Artificial Sequence: Synthetic oligonucleotide
cgggattgcagacgg

SEQ ID NO: 249 - DNA, 15 bp, Artificial Sequence
  Description of Artificial Sequence: Synthetic oligonucleotide
ccgaagctggactgt

SEQ ID NO: 250 - DNA, 15 bp, Artificial Sequence
  Description of Artificial Sequence: Synthetic oligonucleotide
tgactggtttttgta

SEQ ID NO: 251 - DNA, 15 bp, Artificial Sequence
  Description of Artificial Sequence: Synthetic oligonucleotide
ttttttggtggagac

SEQ ID NO: 252 - DNA, 15 bp, Artificial Sequence
  Description of Artificial Sequence: Synthetic oligonucleotide
ggatggttgccgggt

SEQ ID NO: 253 - DNA, 15 bp, Artificial Sequence
  Description of Artificial Sequence: Synthetic oligonucleotide
cggccgccatcccgt

SEQ ID NO: 254 - DNA, 15 bp, Artificial Sequence
  Description of Artificial Sequence: Synthetic oligonucleotide
ggaagtgaggagcgc

SEQ ID NO: 255 - DNA, 15 bp, Artificial Sequence
  Description of Artificial Sequence: Synthetic oligonucleotide
cgagtgcctgggatt

SEQ ID NO: 256 - DNA, 15 bp, Artificial Sequence
  Description of Artificial Sequence: Synthetic oligonucleotide
tggccgcccatcgtc

SEQ ID NO: 257 - DNA, 15 bp, Artificial Sequence
  Description of Artificial Sequence: Synthetic oligonucleotide
gagatgtggggagcg

SEQ ID NO: 258 - DNA, 15 bp, Artificial Sequence
  Description of Artificial Sequence: Synthetic oligonucleotide
cctcttcccggccgc

SEQ ID NO: 259 - DNA, 15 bp, Artificial Sequence
  Description of Artificial Sequence: Synthetic oligonucleotide
gcgtgatctcggctc

SEQ ID NO: 260 - DNA, 15 bp, Artificial Sequence
  Description of Artificial Sequence: Synthetic oligonucleotide
gtgctcaatggtgcc

SEQ ID NO: 261 - DNA, 15 bp, Artificial Sequence
  Description of Artificial Sequence: Synthetic oligonucleotide
tggaatagaaaggcg

SEQ ID NO: 262 - DNA, 15 bp, Artificial Sequence
  Description of Artificial Sequence: Synthetic oligonucleotide
aaagtgctaagattg

SEQ ID NO: 263 - DNA, 15 bp, Artificial Sequence
  Description of Artificial Sequence: Synthetic oligonucleotide
ttccctccactattg

SEQ ID NO: 264 - DNA, 15 bp, Artificial Sequence
  Description of Artificial Sequence: Synthetic oligonucleotide
ccttgggatcctgtt

SEQ ID NO: 265 - DNA, 15 bp, Artificial Sequence
  Description of Artificial Sequence: Synthetic oligonucleotide
cggggtttcgccgtg

SEQ ID NO: 266 - DNA, 15 bp, Artificial Sequence
  Description of Artificial Sequence: Synthetic oligonucleotide
ccaagaattatcaat

SEQ ID NO: 267 - DNA, 15 bp, Artificial Sequence
  Description of Artificial Sequence: Synthetic oligonucleotide
cccaacagctcattg

SEQ ID NO: 268 - DNA, 15 bp, Artificial Sequence
  Description of Artificial Sequence: Synthetic oligonucleotide
tttatctgctgacct

SEQ ID NO: 269 - DNA, 15 bp, Artificial Sequence
  Description of Artificial Sequence: Synthetic oligonucleotide
tgctgttaatctata

SEQ ID NO: 270 - DNA, 15 bp, Artificial Sequence
  Description of Artificial Sequence: Synthetic oligonucleotide
gtggggaaaaaattg

SEQ ID NO: 271 - DNA, 15 bp, Artificial Sequence
  Description of Artificial Sequence: Synthetic oligonucleotide
aggggcgcctctgcc

SEQ ID NO: 272 - DNA, 15 bp, Artificial Sequence
  Description of Artificial Sequence: Synthetic oligonucleotide
ataaaaaaaattaaa

SEQ ID NO: 273 - DNA, 15 bp, Artificial Sequence
  Description of Artificial Sequence: Synthetic oligonucleotide
cgggccaggatgaca

SEQ ID NO: 274 - DNA, 15 bp, Artificial Sequence
  Description of Artificial Sequence: Synthetic oligonucleotide
gagcccctctgcccg

SEQ ID NO: 275 - DNA, 15 bp, Artificial Sequence
  Description of Artificial Sequence: Synthetic oligonucleotide
tctcctgcctcagcc

SEQ ID NO: 276 - DNA, 15 bp, Artificial Sequence
  Description of Artificial Sequence: Synthetic oligonucleotide
gccgcagggacctct

SEQ ID NO: 277 - DNA, 15 bp, Artificial Sequence
  Description of Artificial Sequence: Synthetic oligonucleotide
gtagacatgggagac

SEQ ID NO: 278 - DNA, 15 bp, Artificial Sequence
  Description of Artificial Sequence: Synthetic oligonucleotide
ctccagctcctgacc

SEQ ID NO: 279 - DNA, 15 bp, Artificial Sequence
  Description of Artificial Sequence: Synthetic oligonucleotide
tgggatcctgttgat

SEQ ID NO: 280 - DNA, 15 bp, Artificial Sequence
  Description of Artificial Sequence: Synthetic oligonucleotide
ggatggttgccgtgt

SEQ ID NO: 281 - DNA, 15 bp, Artificial Sequence
  Description of Artificial Sequence: Synthetic oligonucleotide
ctggtttttgtattt

SEQ ID NO: 282 - DNA, 15 bp, Artificial Sequence
  Description of Artificial Sequence: Synthetic oligonucleotide
agtgaggagcgtctc

SEQ ID NO: 283 - DNA, 15 bp, Artificial Sequence
  Description of Artificial Sequence: Synthetic oligonucleotide
gtctgggaggtgggg

SEQ ID NO: 284 - DNA, 15 bp, Artificial Sequence
  Description of Artificial Sequence: Synthetic oligonucleotide
aaccccgtgctctct

SEQ ID NO: 285 - DNA, 15 bp, Artificial Sequence
  Description of Artificial Sequence: Synthetic oligonucleotide
cgtctgggaagtgag

SEQ ID NO: 286 - DNA, 15 bp, Artificial Sequence
  Description of Artificial Sequence: Synthetic oligonucleotide
tgcctcagcctgccg

SEQ ID NO: 287 - DNA, 15 bp, Artificial Sequence
  Description of Artificial Sequence: Synthetic oligonucleotide
cttatccccaaccct

SEQ ID NO: 288 - DNA, 15 bp, Artificial Sequence
  Description of Artificial Sequence: Synthetic oligonucleotide
aggagcgtctctgcc

SEQ ID NO: 289 - DNA, 15 bp, Artificial Sequence
  Description of Artificial Sequence: Synthetic oligonucleotide
tattgtcctatgacc

SEQ ID NO: 290 - DNA, 15 bp, Artificial Sequence
  Description of Artificial Sequence: Synthetic oligonucleotide
tccccaaccctgtgc

SEQ ID NO: 291 - DNA, 15 bp, Artificial Sequence
  Description of Artificial Sequence: Synthetic oligonucleotide
gactccattttgttc

SEQ ID NO: 292 - DNA, 15 bp, Artificial Sequence
  Description of Artificial Sequence: Synthetic oligonucleotide
cactattgtcctatg

SEQ ID NO: 293 - DNA, 15 bp, Artificial Sequence
  Description of Artificial Sequence: Synthetic oligonucleotide
gaagtgaggagcgcc

SEQ ID NO: 294 - DNA, 15 bp, Artificial Sequence
  Description of Artificial Sequence: Synthetic oligonucleotide
cgcagggacctctgc

SEQ ID NO: 295 - DNA, 15 bp, Artificial Sequence
  Description of Artificial Sequence: Synthetic oligonucleotide
cttgaaggcagcatg

SEQ ID NO: 296 - DNA, 15 bp, Artificial Sequence
  Description of Artificial Sequence: Synthetic oligonucleotide
ttggtggagacgggg

SEQ ID NO: 297 - DNA, 15 bp, Artificial Sequence
  Description of Artificial Sequence: Synthetic oligonucleotide
cccaaagagccggat

SEQ ID NO: 298 - DNA, 15 bp, Artificial Sequence
  Description of Artificial Sequence: Synthetic oligonucleotide
gcctgattctcctgc

SEQ ID NO: 299 - DNA, 15 bp, Artificial Sequence
  Description of Artificial Sequence: Synthetic oligonucleotide
ttttcattttgttct

SEQ ID NO: 300 - DNA, 15 bp, Artificial Sequence
  Description of Artificial Sequence: Synthetic oligonucleotide
gttactgtgtctgtg

SEQ ID NO: 301 - DNA, 15 bp, Artificial Sequence
  Description of Artificial Sequence: Synthetic oligonucleotide
tgaccgcgagtgatc

SEQ ID NO: 302 - DNA, 15 bp, Artificial Sequence
  Description of Artificial Sequence: Synthetic oligonucleotide
ctcgttcactcagtg

SEQ ID NO: 303 - DNA, 15 bp, Artificial Sequence
  Description of Artificial Sequence: Synthetic oligonucleotide
ccgccatcccgtctg

SEQ ID NO: 304 - DNA, 15 bp, Artificial Sequence
  Description of Artificial Sequence: Synthetic oligonucleotide
tctccagcccctaac

SEQ ID NO: 305 - DNA, 15 bp, Artificial Sequence
  Description of Artificial Sequence: Synthetic oligonucleotide
ctctccgagaaacac

SEQ ID NO: 306 - DNA, 15 bp, Artificial Sequence
  Description of Artificial Sequence: Synthetic oligonucleotide
ggatagaagtagaca

SEQ ID NO: 307 - DNA, 15 bp, Artificial Sequence
  Description of Artificial Sequence: Synthetic oligonucleotide
cggattgttgctgtg

SEQ ID NO: 308 - DNA, 15 bp, Artificial Sequence
  Description of Artificial Sequence: Synthetic oligonucleotide
tgtgctgtgtccact

SEQ ID NO: 309 - DNA, 15 bp, Artificial Sequence
  Description of Artificial Sequence: Synthetic oligonucleotide
aggtggggaaaagat

SEQ ID NO: 310 - DNA, 15 bp, Artificial Sequence
  Description of Artificial Sequence: Synthetic oligonucleotide
catgtgctgtgtcaa

SEQ ID NO: 311 - DNA, 15 bp, Artificial Sequence
  Description of Artificial Sequence: Synthetic oligonucleotide
tccactcagggttaa

SEQ ID NO: 312 - DNA, 15 bp, Artificial Sequence
  Description of Artificial Sequence: Synthetic oligonucleotide
gtggcgtgatctcgg

SEQ ID NO: 313 - DNA, 15 bp, Artificial Sequence
  Description of Artificial Sequence: Synthetic oligonucleotide
cccagccgcctgcct

SEQ ID NO: 314 - DNA, 15 bp, Artificial Sequence
  Description of Artificial Sequence: Synthetic oligonucleotide
tgaccgggctggtct

SEQ ID NO: 315 - DNA, 15 bp, Artificial Sequence
  Description of Artificial Sequence: Synthetic oligonucleotide
gagcccctctgcctg

SEQ ID NO: 316 - DNA, 15 bp, Artificial Sequence
  Description of Artificial Sequence: Synthetic oligonucleotide
gggccggtctccagc

SEQ ID NO: 317 - DNA, 15 bp, Artificial Sequence
  Description of Artificial Sequence: Synthetic oligonucleotide
ggctggtctccagct

SEQ ID NO: 318 - DNA, 15 bp, Artificial Sequence
  Description of Artificial Sequence: Synthetic oligonucleotide
ccctactgggaagtg

SEQ ID NO: 319 - DNA, 15 bp, Artificial Sequence
  Description of Artificial Sequence: Synthetic oligonucleotide
gaggtgtacccaaca

SEQ ID NO: 320 - DNA, 15 bp, Artificial Sequence
  Description of Artificial Sequence: Synthetic oligonucleotide
ggatgtggggagcgc

SEQ ID NO: 321 - DNA, 15 bp, Artificial Sequence
  Description of Artificial Sequence: Synthetic oligonucleotide
cctttgttcacatgt

SEQ ID NO: 322 - DNA, 15 bp, Artificial Sequence
  Description of Artificial Sequence: Synthetic oligonucleotide
atgttgcccaggctg

SEQ ID NO: 323 - DNA, 15 bp, Artificial Sequence
  Description of Artificial Sequence: Synthetic oligonucleotide
ctttgttcacatgtt

SEQ ID NO: 324 - DNA, 15 bp, Artificial Sequence
  Description of Artificial Sequence: Synthetic oligonucleotide
aaagctggacggtac

SEQ ID NO: 325 - DNA, 15 bp, Artificial Sequence
  Description of Artificial Sequence: Synthetic oligonucleotide
gatgggccatgatga

SEQ ID NO: 326 - DNA, 15 bp, Artificial Sequence
  Description of Artificial Sequence: Synthetic oligonucleotide
ctaaccgcgagtgat

SEQ ID NO: 327 - DNA, 15 bp, Artificial Sequence
  Description of Artificial Sequence: Synthetic oligonucleotide
gctttgttaaacaga

SEQ ID NO: 328 - DNA, 15 bp, Artificial Sequence
  Description of Artificial Sequence: Synthetic oligonucleotide
ccggccgccatccca

SEQ ID NO: 329 - DNA, 15 bp, Artificial Sequence
  Description of Artificial Sequence: Synthetic oligonucleotide
ccccaaccctgtgct

SEQ ID NO: 330 - DNA, 15 bp, Artificial Sequence
  Description of Artificial Sequence: Synthetic oligonucleotide
gtctccagctcctga

SEQ ID NO: 331 - DNA, 15 bp, Artificial Sequence
  Description of Artificial Sequence: Synthetic oligonucleotide
agccaaagctggacg

SEQ ID NO: 332 - DNA, 15 bp, Artificial Sequence
  Description of Artificial Sequence: Synthetic oligonucleotide
gtctccagctcctgg

SEQ ID NO: 333 - DNA, 15 bp, Artificial Sequence
  Description of Artificial Sequence: Synthetic oligonucleotide
tgcgattgcaggcgc

SEQ ID NO: 334 - DNA, 15 bp, Artificial Sequence
  Description of Artificial Sequence: Synthetic oligonucleotide
gaaaagatagagaaa

SEQ ID NO: 335 - DNA, 15 bp, Artificial Sequence
  Description of Artificial Sequence: Synthetic oligonucleotide
ggttgccgggtctgt

SEQ ID NO: 336 - DNA, 15 bp, Artificial Sequence
  Description of Artificial Sequence: Synthetic oligonucleotide
gctggtctccagctc

SEQ ID NO: 337 - DNA, 15 bp, Artificial Sequence
  Description of Artificial Sequence: Synthetic oligonucleotide
gcagcctctgcccgg

SEQ ID NO: 338 - DNA, 15 bp, Artificial Sequence
  Description of Artificial Sequence: Synthetic oligonucleotide
ttgcaggcgcgcgcc

SEQ ID NO: 339 - DNA, 15 bp, Artificial Sequence
  Description of Artificial Sequence: Synthetic oligonucleotide
ccacatccccctctc

SEQ ID NO: 340 - DNA, 15 bp, Artificial Sequence
  Description of Artificial Sequence: Synthetic oligonucleotide
gggatgtgaggagcg

SEQ ID NO: 341 - DNA, 15 bp, Artificial Sequence
  Description of Artificial Sequence: Synthetic oligonucleotide
ctccgcccggccgcc

SEQ ID NO: 342 - DNA, 15 bp, Artificial Sequence
  Description of Artificial Sequence: Synthetic oligonucleotide
gggatgtgaggagcc

SEQ ID NO: 343 - DNA, 15 bp, Artificial Sequence
  Description of Artificial Sequence: Synthetic oligonucleotide
agactccattttgtt

SEQ ID NO: 344 - DNA, 15 bp, Artificial Sequence
  Description of Artificial Sequence: Synthetic oligonucleotide
atcggattgttgctg

SEQ ID NO: 345 - DNA, 15 bp, Artificial Sequence
  Description of Artificial Sequence: Synthetic oligonucleotide
gaggtgggggggtca

SEQ ID NO: 346 - DNA, 15 bp, Artificial Sequence
  Description of Artificial Sequence: Synthetic oligonucleotide
cctctgccccgccgc

SEQ ID NO: 347 - DNA, 15 bp, Artificial Sequence
  Description of Artificial Sequence: Synthetic oligonucleotide
cctctgtgagaaaca

SEQ ID NO: 348 - DNA, 15 bp, Artificial Sequence
  Description of Artificial Sequence: Synthetic oligonucleotide
gacctttgttcacat

SEQ ID NO: 349 - DNA, 15 bp, Artificial Sequence
  Description of Artificial Sequence: Synthetic oligonucleotide
ctgccatctcggctc

SEQ ID NO: 350 - DNA, 15 bp, Artificial Sequence
  Description of Artificial Sequence: Synthetic oligonucleotide
tgctgaccttctctc

SEQ ID NO: 351 - DNA, 15 bp, Artificial Sequence
  Description of Artificial Sequence: Synthetic oligonucleotide
ctctccctgtcccct

SEQ ID NO: 352 - DNA, 15 bp, Artificial Sequence
  Description of Artificial Sequence: Synthetic oligonucleotide
gccgcccagtctggg

SEQ ID NO: 353 - DNA, 15 bp, Artificial Sequence
  Description of Artificial Sequence: Synthetic oligonucleotide
ctgcggaaggccgca

SEQ ID NO: 354 - DNA, 15 bp, Artificial Sequence
  Description of Artificial Sequence: Synthetic oligonucleotide
cccggccgcccatcg

SEQ ID NO: 355 - DNA, 15 bp, Artificial Sequence
  Description of Artificial Sequence: Synthetic oligonucleotide
aaaaattcttctgcc

SEQ ID NO: 356 - DNA, 15 bp, Artificial Sequence
  Description of Artificial Sequence: Synthetic oligonucleotide
gccgagtgcctggga

SEQ ID NO: 357 - DNA, 15 bp, Artificial Sequence
  Description of Artificial Sequence: Synthetic oligonucleotide
ctgctgaccttccct

SEQ ID NO: 358 - DNA, 15 bp, Artificial Sequence
  Description of Artificial Sequence: Synthetic oligonucleotide
acgcctgactggttt

SEQ ID NO: 359 - DNA, 15 bp, Artificial Sequence
  Description of Artificial Sequence: Synthetic oligonucleotide
acccaacagctcatt

SEQ ID NO: 360 - DNA, 15 bp, Artificial Sequence
  Description of Artificial Sequence: Synthetic oligonucleotide
ggattgttgctgtgt

SEQ ID NO: 361 - DNA, 15 bp, Artificial Sequence
  Description of Artificial Sequence: Synthetic oligonucleotide
ccctgcctgattctc

SEQ ID NO: 362 - DNA, 15 bp, Artificial Sequence
  Description of Artificial Sequence: Synthetic oligonucleotide
tgccgtgtctgtgta

SEQ ID NO: 363 - DNA, 15 bp, Artificial Sequence
  Description of Artificial Sequence: Synthetic oligonucleotide
ggaaaggtggggaaa

SEQ ID NO: 364 - DNA, 15 bp, Artificial Sequence
  Description of Artificial Sequence: Synthetic oligonucleotide
gtggggaaaagaaag

SEQ ID NO: 365 - DNA, 15 bp, Artificial Sequence
  Description of Artificial Sequence: Synthetic oligonucleotide
tgggagacttcattt

SEQ ID NO: 366 - DNA, 15 bp, Artificial Sequence
  Description of Artificial Sequence: Synthetic oligonucleotide
tctgggaggtgtgcc

SEQ ID NO: 367 - DNA, 15 bp, Artificial Sequence
  Description of Artificial Sequence: Synthetic oligonucleotide
ggacacaaacactgc

SEQ ID NO: 368 - DNA, 15 bp, Artificial Sequence
  Description of Artificial Sequence: Synthetic oligonucleotide
tgcctggccgcccag

SEQ ID NO: 369 - DNA, 15 bp, Artificial Sequence
  Description of Artificial Sequence: Synthetic oligonucleotide
acggagtctcgctca

SEQ ID NO: 370 - DNA, 15 bp, Artificial Sequence
  Description of Artificial Sequence: Synthetic oligonucleotide
gtctcgctcactcag

SEQ ID NO: 371 - DNA, 15 bp, Artificial Sequence
  Description of Artificial Sequence: Synthetic oligonucleotide
tcaagtaatcaggga

SEQ ID NO: 372 - DNA, 15 bp, Artificial Sequence
  Description of Artificial Sequence: Synthetic oligonucleotide
gcggttttgtcgaat

SEQ ID NO: 373 - DNA, 15 bp, Artificial Sequence
  Description of Artificial Sequence: Synthetic oligonucleotide
gccaaagctggacgg

SEQ ID NO: 374 - DNA, 15 bp, Artificial Sequence
  Description of Artificial Sequence: Synthetic oligonucleotide
cactccctaatctta

SEQ ID NO: 375 - DNA, 15 bp, Artificial Sequence
  Description of Artificial Sequence: Synthetic oligonucleotide
accactccctaatct

SEQ ID NO: 376 - DNA, 15 bp, Artificial Sequence
  Description of Artificial Sequence: Synthetic oligonucleotide
gcggttttgtcgaaa

SEQ ID NO: 377 - DNA, 15 bp, Artificial Sequence
  Description of Artificial Sequence: Synthetic oligonucleotide
ttgtggaatagaaag

SEQ ID NO: 378 - DNA, 15 bp, Artificial Sequence
  Description of Artificial Sequence: Synthetic oligonucleotide
cccgtgctctctgaa

SEQ ID NO: 379 - DNA, 15 bp, Artificial Sequence
  Description of Artificial Sequence: Synthetic oligonucleotide
taggaagtgaggagc

SEQ ID NO: 380 - DNA, 15 bp, Artificial Sequence
  Description of Artificial Sequence: Synthetic oligonucleotide
aaaaattgagaaatc

SEQ ID NO: 381 - DNA, 15 bp, Artificial Sequence
  Description of Artificial Sequence: Synthetic oligonucleotide
gcggagccgaagctg

SEQ ID NO: 382 - DNA, 15 bp, Artificial Sequence
  Description of Artificial Sequence: Synthetic oligonucleotide
ctctcatgcggagcc

SEQ ID NO: 383 - DNA, 15 bp, Artificial Sequence
  Description of Artificial Sequence: Synthetic oligonucleotide
ggtgaggggcgcctc

SEQ ID NO: 384 - DNA, 15 bp, Artificial Sequence
  Description of Artificial Sequence: Synthetic oligonucleotide
aggccgcagggtcct

SEQ ID NO: 385 - DNA, 15 bp, Artificial Sequence
  Description of Artificial Sequence: Synthetic oligonucleotide
gccacgcctgactgg

SEQ ID NO: 386 - DNA, 15 bp, Artificial Sequence
  Description of Artificial Sequence: Synthetic oligonucleotide
cggccgccatcccat

SEQ ID NO: 387 - DNA, 15 bp, Artificial Sequence
  Description of Artificial Sequence: Synthetic oligonucleotide
tctccagctcctggc

SEQ ID NO: 388 - DNA, 15 bp, Artificial Sequence
  Description of Artificial Sequence: Synthetic oligonucleotide
tccgagaaacaccca

SEQ ID NO: 389 - DNA, 15 bp, Artificial Sequence
  Description of Artificial Sequence: Synthetic oligonucleotide
cactcagggttaaat

SEQ ID NO: 390 - DNA, 15 bp, Artificial Sequence
  Description of Artificial Sequence: Synthetic oligonucleotide
cggccaccgccccgt

SEQ ID NO: 391 - DNA, 15 bp, Artificial Sequence
  Description of Artificial Sequence: Synthetic oligonucleotide
gtagacataggagac

SEQ ID NO: 392 - DNA, 15 bp, Artificial Sequence
  Description of Artificial Sequence: Synthetic oligonucleotide
agtgctaagattgca

SEQ ID NO: 393 - DNA, 15 bp, Artificial Sequence
  Description of Artificial Sequence: Synthetic oligonucleotide
ttctgccttgggatg

SEQ ID NO: 394 - DNA, 15 bp, Artificial Sequence
  Description of Artificial Sequence: Synthetic oligonucleotide
tcccctctttccacg

SEQ ID NO: 395 - DNA, 15 bp, Artificial Sequence
  Description of Artificial Sequence: Synthetic oligonucleotide
ggggaaaagaaagag

SEQ ID NO: 396 - DNA, 15 bp, Artificial Sequence
  Description of Artificial Sequence: Synthetic oligonucleotide
agattgttactgtgt

SEQ ID NO: 397 - DNA, 15 bp, Artificial Sequence
  Description of Artificial Sequence: Synthetic oligonucleotide
tcgctacaacctaca

SEQ ID NO: 398 - DNA, 15 bp, Artificial Sequence
  Description of Artificial Sequence: Synthetic oligonucleotide
ctcccaaagtgctaa

SEQ ID NO: 399 - DNA, 15 bp, Artificial Sequence
  Description of Artificial Sequence: Synthetic oligonucleotide
cccagcgaccattga

SEQ ID NO: 400 - DNA, 15 bp, Artificial Sequence
  Description of Artificial Sequence: Synthetic oligonucleotide
cctcggcctgccgag

SEQ ID NO: 401 - DNA, 15 bp, Artificial Sequence
  Description of Artificial Sequence: Synthetic oligonucleotide
cgagattgcagcctc

SEQ ID NO: 402 - DNA, 15 bp, Artificial Sequence
  Description of Artificial Sequence: Synthetic oligonucleotide
aatactaaaaaaaaa

SEQ ID NO: 403 - DNA, 15 bp, Artificial Sequence
  Description of Artificial Sequence: Synthetic oligonucleotide
gctcctggcctcgag

SEQ ID NO: 404 - DNA, 15 bp, Artificial Sequence
  Description of Artificial Sequence: Synthetic oligonucleotide
tcgtctgagatgtgg

SEQ ID NO: 405 - DNA, 15 bp, Artificial Sequence
  Description of Artificial Sequence: Synthetic oligonucleotide
atcaataaatactaa

SEQ ID NO: 406 - DNA, 15 bp, Artificial Sequence
  Description of Artificial Sequence: Synthetic oligonucleotide
gaagtgaggagcgtc

SEQ ID NO: 407 - DNA, 15 bp, Artificial Sequence
  Description of Artificial Sequence: Synthetic oligonucleotide
ggattgcaggcacgc

SEQ ID NO: 408 - DNA, 15 bp, Artificial Sequence
  Description of Artificial Sequence: Synthetic oligonucleotide
aaattcttctgcctt

SEQ ID NO: 409 - DNA, 15 bp, Artificial Sequence
  Description of Artificial Sequence: Synthetic oligonucleotide
cgctacaaccacctc

SEQ ID NO: 410 - DNA, 15 bp, Artificial Sequence
  Description of Artificial Sequence: Synthetic oligonucleotide
ggcgggaaaggtggg

SEQ ID NO: 411 - DNA, 15 bp, Artificial Sequence
  Description of Artificial Sequence: Synthetic oligonucleotide
tctctgcccggccgc

SEQ ID NO: 412 - DNA, 15 bp, Artificial Sequence
  Description of Artificial Sequence: Synthetic oligonucleotide
atggcggttttgtcg

SEQ ID NO: 413 - DNA, 15 bp, Artificial Sequence
  Description of Artificial Sequence: Synthetic oligonucleotide
caagaatgatcaata

SEQ ID NO: 414 - DNA, 15 bp, Artificial Sequence
  Description of Artificial Sequence: Synthetic oligonucleotide
ctgtgaccttacccc

SEQ ID NO: 415 - DNA, 15 bp, Artificial Sequence
  Description of Artificial Sequence: Synthetic oligonucleotide
tgcagcctctgcccg

SEQ ID NO: 416 - DNA, 15 bp, Artificial Sequence
  Description of Artificial Sequence: Synthetic oligonucleotide
aaccttacccccaac

SEQ ID NO: 417 - DNA, 15 bp, Artificial Sequence
  Description of Artificial Sequence: Synthetic oligonucleotide
tggaatagaaagggg

SEQ ID NO: 418 - DNA, 15 bp, Artificial Sequence
  Description of Artificial Sequence: Synthetic oligonucleotide
aagtaatcagggaca

SEQ ID NO: 419 - DNA, 15 bp, Artificial Sequence
  Description of Artificial Sequence: Synthetic oligonucleotide
aaccacctcccagcc

SEQ ID NO: 420 - DNA, 15 bp, Artificial Sequence
  Description of Artificial Sequence: Synthetic oligonucleotide
gtgtcaactcagggt

SEQ ID NO: 421 - DNA, 15 bp, Artificial Sequence
  Description of Artificial Sequence: Synthetic oligonucleotide
gtgaccttatcccca

SEQ ID NO: 422 - DNA, 15 bp, Artificial Sequence
  Description of Artificial Sequence: Synthetic oligonucleotide
gggtttcgctgtgtt

SEQ ID NO: 423 - DNA, 15 bp, Artificial Sequence
  Description of Artificial Sequence: Synthetic oligonucleotide
ctccgagaaacaccc

SEQ ID NO: 424 - DNA, 15 bp, Artificial Sequence
  Description of Artificial Sequence: Synthetic oligonucleotide
gccttgggatgctgt

SEQ ID NO: 425 - DNA, 15 bp, Artificial Sequence
  Description of Artificial Sequence: Synthetic oligonucleotide
gacaatggcggcttt

SEQ ID NO: 426 - DNA, 15 bp, Artificial Sequence
  Description of Artificial Sequence: Synthetic oligonucleotide
taaccgcgagtgatc

SEQ ID NO: 427 - DNA, 15 bp, Artificial Sequence
  Description of Artificial Sequence: Synthetic oligonucleotide
agacggggtttcgcc

SEQ ID NO: 428 - DNA, 15 bp, Artificial Sequence
  Description of Artificial Sequence: Synthetic oligonucleotide
gactgtactgctgcc

SEQ ID NO: 429 - DNA, 15 bp, Artificial Sequence
  Description of Artificial Sequence: Synthetic oligonucleotide
ggttttgtcgaatag

SEQ ID NO: 430 - DNA, 15 bp, Artificial Sequence
  Description of Artificial Sequence: Synthetic oligonucleotide
tcctctgcctaggaa

SEQ ID NO: 431 - DNA, 15 bp, Artificial Sequence
  Description of Artificial Sequence: Synthetic oligonucleotide
gtctgggaggaggtg

SEQ ID NO: 432 - DNA, 15 bp, Artificial Sequence
  Description of Artificial Sequence: Synthetic oligonucleotide
gtctgggaggtgtgc

SEQ ID NO: 433 - DNA, 15 bp, Artificial Sequence
  Description of Artificial Sequence: Synthetic oligonucleotide
ctccctctgatgccg

SEQ ID NO: 434 - DNA, 15 bp, Artificial Sequence
  Description of Artificial Sequence: Synthetic oligonucleotide
agacggggtttcgct

SEQ ID NO: 435 - DNA, 15 bp, Artificial Sequence
  Description of Artificial Sequence: Synthetic oligonucleotide
acatgtttatctgct

SEQ ID NO: 436 - DNA, 15 bp, Artificial Sequence
  Description of Artificial Sequence: Synthetic oligonucleotide
gaatagaaaaggggg

SEQ ID NO: 437 - DNA, 15 bp, Artificial Sequence
  Description of Artificial Sequence: Synthetic oligonucleotide
tgggatgctgttgat

SEQ ID NO: 438 - DNA, 15 bp, Artificial Sequence
  Description of Artificial Sequence: Synthetic oligonucleotide
tggccgggctggtct

SEQ ID NO: 439 - DNA, 15 bp, Artificial Sequence
  Description of Artificial Sequence: Synthetic oligonucleotide
tcaataaaaaaaatt

SEQ ID NO: 440 - DNA, 15 bp, Artificial Sequence
  Description of Artificial Sequence: Synthetic oligonucleotide
gaaatgtggggaaaa

SEQ ID NO: 441 - DNA, 15 bp, Artificial Sequence
  Description of Artificial Sequence: Synthetic oligonucleotide
gctacaacctccacc

SEQ ID NO: 442 - DNA, 15 bp, Artificial Sequence
  Description of Artificial Sequence: Synthetic oligonucleotide
cgcctgactggtttt

SEQ ID NO: 443 - DNA, 15 bp, Artificial Sequence
  Description of Artificial Sequence: Synthetic oligonucleotide
ctgggaagtgaggag

SEQ ID NO: 444 - DNA, 15 bp, Artificial Sequence
  Description of Artificial Sequence: Synthetic oligonucleotide
gatccgccagcctcg

SEQ ID NO: 445 - DNA, 15 bp, Artificial Sequence
  Description of Artificial Sequence: Synthetic oligonucleotide
gtacccagcgaccat

SEQ ID NO: 446 - DNA, 15 bp, Artificial Sequence
  Description of Artificial Sequence: Synthetic oligonucleotide
tcttcccggccgcca

SEQ ID NO: 447 - DNA, 15 bp, Artificial Sequence
  Description of Artificial Sequence: Synthetic oligonucleotide
gcgcgcgccgccacg

SEQ ID NO: 448 - DNA, 15 bp, Artificial Sequence
  Description of Artificial Sequence: Synthetic oligonucleotide
cggctttgtggaata

SEQ ID NO: 449 - DNA, 15 bp, Artificial Sequence
  Description of Artificial Sequence: Synthetic oligonucleotide
gtctccctctgttgc

SEQ ID NO: 450 - DNA, 15 bp, Artificial Sequence
  Description of Artificial Sequence: Synthetic oligonucleotide
ctcccctctttccac

SEQ ID NO: 451 - DNA, 15 bp, Artificial Sequence
  Description of Artificial Sequence: Synthetic oligonucleotide
tcccagccgcctgcc

SEQ ID NO: 452 - DNA, 15 bp, Artificial Sequence
  Description of Artificial Sequence: Synthetic oligonucleotide
gctctctgaaacatg

SEQ ID NO: 453 - DNA, 15 bp, Artificial Sequence
  Description of Artificial Sequence: Synthetic oligonucleotide
gggaaaagattgaga

SEQ ID NO: 454 - DNA, 15 bp, Artificial Sequence
  Description of Artificial Sequence: Synthetic oligonucleotide
cgcgcgccgccacgc

SEQ ID NO: 455 - DNA, 15 bp, Artificial Sequence
  Description of Artificial Sequence: Synthetic oligonucleotide
ccctctgatgccgag

SEQ ID NO: 456 - DNA, 15 bp, Artificial Sequence
  Description of Artificial Sequence: Synthetic oligonucleotide
ttgggatgctgttaa

SEQ ID NO: 457 - DNA, 15 bp, Artificial Sequence
  Description of Artificial Sequence: Synthetic oligonucleotide
tgcccagtctgggaa

SEQ ID NO: 458 - DNA, 15 bp, Artificial Sequence
  Description of Artificial Sequence: Synthetic oligonucleotide
cacccaagaatgatc

SEQ ID NO: 459 - DNA, 15 bp, Artificial Sequence
  Description of Artificial Sequence: Synthetic oligonucleotide
ctccagctcctaacc

SEQ ID NO: 460 - DNA, 15 bp, Artificial Sequence
  Description of Artificial Sequence: Synthetic oligonucleotide
ggcgggaagggtggg

SEQ ID NO: 461 - DNA, 15 bp, Artificial Sequence
  Description of Artificial Sequence: Synthetic oligonucleotide
ctgattctcctgcct

SEQ ID NO: 462 - DNA, 15 bp, Artificial Sequence
  Description of Artificial Sequence: Synthetic oligonucleotide
aggcgggaagggtgg

SEQ ID NO: 463 - DNA, 15 bp, Artificial Sequence
  Description of Artificial Sequence: Synthetic oligonucleotide
cccccgcccggccag

SEQ ID NO: 464 - DNA, 15 bp, Artificial Sequence
  Description of Artificial Sequence: Synthetic oligonucleotide
cctggccgcccagtc

SEQ ID NO: 465 - DNA, 15 bp, Artificial Sequence
  Description of Artificial Sequence: Synthetic oligonucleotide
gtctgggaagtgagg

SEQ ID NO: 466 - DNA, 15 bp, Artificial Sequence
  Description of Artificial Sequence: Synthetic oligonucleotide
gtgtacccagcgacc

SEQ ID NO: 467 - DNA, 15 bp, Artificial Sequence
  Description of Artificial Sequence: Synthetic oligonucleotide
ggaaaagaaagagag

SEQ ID NO: 468 - DNA, 15 bp, Artificial Sequence
  Description of Artificial Sequence: Synthetic oligonucleotide
ctgcctggccgccca

SEQ ID NO: 469 - DNA, 15 bp, Artificial Sequence
  Description of Artificial Sequence: Synthetic oligonucleotide
tctgcccggccaccg

SEQ ID NO: 470 - DNA, 15 bp, Artificial Sequence
  Description of Artificial Sequence: Synthetic oligonucleotide
cggagtctcgctcac

SEQ ID NO: 471 - DNA, 15 bp, Artificial Sequence
  Description of Artificial Sequence: Synthetic oligonucleotide
gctgttgatctgtga

SEQ ID NO: 472 - DNA, 15 bp, Artificial Sequence
  Description of Artificial Sequence: Synthetic oligonucleotide
tctgcccggccacca

SEQ ID NO: 473 - DNA, 15 bp, Artificial Sequence
  Description of Artificial Sequence: Synthetic oligonucleotide
ggggagcacctctgc

SEQ ID NO: 474 - DNA, 15 bp, Artificial Sequence
  Description of Artificial Sequence: Synthetic oligonucleotide
tgccgagccgaggct

SEQ ID NO: 475 - DNA, 15 bp, Artificial Sequence
  Description of Artificial Sequence: Synthetic oligonucleotide
tccctctccctctcc

SEQ ID NO: 476 - DNA, 15 bp, Artificial Sequence
  Description of Artificial Sequence: Synthetic oligonucleotide
aggcagcatgctcgt

SEQ ID NO: 477 - DNA, 15 bp, Artificial Sequence
  Description of Artificial Sequence: Synthetic oligonucleotide
gagtgatctgcccgc

SEQ ID NO: 478 - DNA, 15 bp, Artificial Sequence
  Description of Artificial Sequence: Synthetic oligonucleotide
gcccggccagccgcc

SEQ ID NO: 479 - DNA, 15 bp, Artificial Sequence
  Description of Artificial Sequence: Synthetic oligonucleotide
cggtactgctgccat

SEQ ID NO: 480 - DNA, 15 bp, Artificial Sequence
  Description of Artificial Sequence: Synthetic oligonucleotide
tcagcctgccgagtg

SEQ ID NO: 481 - DNA, 15 bp, Artificial Sequence
  Description of Artificial Sequence: Synthetic oligonucleotide
ccctctttctacggt

SEQ ID NO: 482 - DNA, 15 bp, Artificial Sequence
  Description of Artificial Sequence: Synthetic oligonucleotide
tgccttgggatcctg

SEQ ID NO: 483 - DNA, 15 bp, Artificial Sequence
  Description of Artificial Sequence: Synthetic oligonucleotide
gaggggcgcctctgc

SEQ ID NO: 484 - DNA, 15 bp, Artificial Sequence
  Description of Artificial Sequence: Synthetic oligonucleotide
tccgcccggccgcca

SEQ ID NO: 485 - DNA, 15 bp, Artificial Sequence
  Description of Artificial Sequence: Synthetic oligonucleotide
accttccctccacta

SEQ ID NO: 486 - DNA, 15 bp, Artificial Sequence
  Description of Artificial Sequence: Synthetic oligonucleotide
ctgggattgcaggcg

SEQ ID NO: 487 - DNA, 15 bp, Artificial Sequence
  Description of Artificial Sequence: Synthetic oligonucleotide
gttaatctataacct

SEQ ID NO: 488 - DNA, 15 bp, Artificial Sequence
  Description of Artificial Sequence: Synthetic oligonucleotide
tgtggggagcacctc

SEQ ID NO: 489 - DNA, 15 bp, Artificial Sequence
  Description of Artificial Sequence: Synthetic oligonucleotide
gctgtgttggccggg

SEQ ID NO: 490 - DNA, 15 bp, Artificial Sequence
  Description of Artificial Sequence: Synthetic oligonucleotide
ccccttctgggaagt

SEQ ID NO: 491 - DNA, 15 bp, Artificial Sequence
  Description of Artificial Sequence: Synthetic oligonucleotide
ccagcccctaaccgc

SEQ ID NO: 492 - DNA, 15 bp, Artificial Sequence
  Description of Artificial Sequence: Synthetic oligonucleotide
agatgtggggagcgc

SEQ ID NO: 493 - DNA, 15 bp, Artificial Sequence
  Description of Artificial Sequence: Synthetic oligonucleotide
tctcgttcactcagt

SEQ ID NO: 494 - DNA, 15 bp, Artificial Sequence
  Description of Artificial Sequence: Synthetic oligonucleotide
ctggacggtactgct

SEQ ID NO: 495 - DNA, 15 bp, Artificial Sequence
  Description of Artificial Sequence: Synthetic oligonucleotide
gggggtcagcccccc

SEQ ID NO: 496 - DNA, 15 bp, Artificial Sequence
  Description of Artificial Sequence: Synthetic oligonucleotide
gaaaggcgggaaggg

SEQ ID NO: 497 - DNA, 15 bp, Artificial Sequence
  Description of Artificial Sequence: Synthetic oligonucleotide
ataaaaaaaaaaaaa

SEQ ID NO: 498 - DNA, 15 bp, Artificial Sequence
  Description of Artificial Sequence: Synthetic oligonucleotide
ggttttggtggagac

SEQ ID NO: 499 - DNA, 15 bp, Artificial Sequence
  Description of Artificial Sequence: Synthetic oligonucleotide
tgccgagccgaagct

SEQ ID NO: 500 - DNA, 15 bp, Artificial Sequence
  Description of Artificial Sequence: Synthetic oligonucleotide
agagatcagattgtt

SEQ ID NO: 501 - DNA, 15 bp, Artificial Sequence
  Description of Artificial Sequence: Synthetic oligonucleotide
gaagtagacatagga

SEQ ID NO: 502 - DNA, 15 bp, Artificial Sequence
  Description of Artificial Sequence: Synthetic oligonucleotide
gaagggtggggaaaa

SEQ ID NO: 503 - DNA, 15 bp, Artificial Sequence
  Description of Artificial Sequence: Synthetic oligonucleotide
cagcggctcattggg

SEQ ID NO: 504 - DNA, 15 bp, Artificial Sequence
  Description of Artificial Sequence: Synthetic oligonucleotide
ggaagggtggggaaa

SEQ ID NO: 505 - DNA, 15 bp, Artificial Sequence
  Description of Artificial Sequence: Synthetic oligonucleotide
ccccgtctgggagga

SEQ ID NO: 506 - DNA, 15 bp, Artificial Sequence
  Description of Artificial Sequence: Synthetic oligonucleotide
cacatccccctctcc

SEQ ID NO: 507 - DNA, 15 bp, Artificial Sequence
  Description of Artificial Sequence: Synthetic oligonucleotide
gcctcccaaagtgct

SEQ ID NO: 508 - DNA, 15 bp, Artificial Sequence
  Description of Artificial Sequence: Synthetic oligonucleotide
gagaaatcggatggt

SEQ ID NO: 509 - DNA, 15 bp, Artificial Sequence
  Description of Artificial Sequence: Synthetic oligonucleotide
gccccccgcccggcc

SEQ ID NO: 510 - DNA, 15 bp, Artificial Sequence
  Description of Artificial Sequence: Synthetic oligonucleotide
cgaccattgagaacg

SEQ ID NO: 511 - DNA, 15 bp, Artificial Sequence
  Description of Artificial Sequence: Synthetic oligonucleotide
tcccaaagtgccgag

SEQ ID NO: 512 - DNA, 15 bp, Artificial Sequence
  Description of Artificial Sequence: Synthetic oligonucleotide
ccccgtctgggaggt

SEQ ID NO: 513 - DNA, 15 bp, Artificial Sequence
  Description of Artificial Sequence: Synthetic oligonucleotide
cacccaagaattatc

SEQ ID NO: 514 - DNA, 15 bp, Artificial Sequence
  Description of Artificial Sequence: Synthetic oligonucleotide
gcctcccaaagtgcc

SEQ ID NO: 515 - DNA, 15 bp, Artificial Sequence
  Description of Artificial Sequence: Synthetic oligonucleotide
tccctaatcttaagt

SEQ ID NO: 516 - DNA, 15 bp, Artificial Sequence
  Description of Artificial Sequence: Synthetic oligonucleotide
cgggaaaggtgggga

SEQ ID NO: 517 - DNA, 15 bp, Artificial Sequence
  Description of Artificial Sequence: Synthetic oligonucleotide
ttctgccttgggatc

SEQ ID NO: 518 - DNA, 15 bp, Artificial Sequence
  Description of Artificial Sequence: Synthetic oligonucleotide
agccccccgcccggc

SEQ ID NO: 519 - DNA, 15 bp, Artificial Sequence
  Description of Artificial Sequence: Synthetic oligonucleotide
ccaggctggagtgca

SEQ ID NO: 520 - DNA, 15 bp, Artificial Sequence
  Description of Artificial Sequence: Synthetic oligonucleotide
agaaatcggatggtt

SEQ ID NO: 521 - DNA, 15 bp, Artificial Sequence
  Description of Artificial Sequence: Synthetic oligonucleotide
aaaattgagaaatcg

SEQ ID NO: 522 - DNA, 15 bp, Artificial Sequence
  Description of Artificial Sequence: Synthetic oligonucleotide
tctgccttgggatcc

SEQ ID NO: 523 - DNA, 15 bp, Artificial Sequence
  Description of Artificial Sequence: Synthetic oligonucleotide
gcctggccgcccatc

SEQ ID NO: 524 - DNA, 15 bp, Artificial Sequence
  Description of Artificial Sequence: Synthetic oligonucleotide
gattaagggcggtgc

SEQ ID NO: 525 - DNA, 15 bp, Artificial Sequence
  Description of Artificial Sequence: Synthetic oligonucleotide
gccgccccttctggg

SEQ ID NO: 526 - DNA, 15 bp, Artificial Sequence
  Description of Artificial Sequence: Synthetic oligonucleotide
cagccccccgcccgg

SEQ ID NO: 527 - DNA, 15 bp, Artificial Sequence
  Description of Artificial Sequence: Synthetic oligonucleotide
gcgccgccacgcctg

SEQ ID NO: 528 - DNA, 15 bp, Artificial Sequence
  Description of Artificial Sequence: Synthetic oligonucleotide
ctgcccggccgccca

SEQ ID NO: 529 - DNA, 15 bp, Artificial Sequence
  Description of Artificial Sequence: Synthetic oligonucleotide
cccctctgcctggct

SEQ ID NO: 530 - DNA, 15 bp, Artificial Sequence
  Description of Artificial Sequence: Synthetic oligonucleotide
ctgcccggccgcccc

SEQ ID NO: 531 - DNA, 15 bp, Artificial Sequence
  Description of Artificial Sequence: Synthetic oligonucleotide
caggcgcgcgccgcc

SEQ ID NO: 532 - DNA, 15 bp, Artificial Sequence
  Description of Artificial Sequence: Synthetic oligonucleotide
gctacaacctacacc

SEQ ID NO: 533 - DNA, 15 bp, Artificial Sequence
  Description of Artificial Sequence: Synthetic oligonucleotide
ggtcagccccccgcc

SEQ ID NO: 534 - DNA, 15 bp, Artificial Sequence
  Description of Artificial Sequence: Synthetic oligonucleotide
tgatctgtgacctta

SEQ ID NO: 535 - DNA, 15 bp, Artificial Sequence
  Description of Artificial Sequence: Synthetic oligonucleotide
taagtacccagggac

SEQ ID NO: 536 - DNA, 15 bp, Artificial Sequence
  Description of Artificial Sequence: Synthetic oligonucleotide
gttgaccgggctggt

SEQ ID NO: 537 - DNA, 15 bp, Artificial Sequence
  Description of Artificial Sequence: Synthetic oligonucleotide
tggccgcccagtctg

SEQ ID NO: 538 - DNA, 15 bp, Artificial Sequence
  Description of Artificial Sequence: Synthetic oligonucleotide
gcggaaggccgcagg

SEQ ID NO: 539 - DNA, 15 bp, Artificial Sequence
  Description of Artificial Sequence: Synthetic oligonucleotide
tactgggaagtgagg

SEQ ID NO: 540 - DNA, 15 bp, Artificial Sequence
  Description of Artificial Sequence: Synthetic oligonucleotide
ttcgtatttttttgg

SEQ ID NO: 541 - DNA, 15 bp, Artificial Sequence
  Description of Artificial Sequence: Synthetic oligonucleotide
gggaaaggtggggaa

SEQ ID NO: 542 - DNA, 15 bp, Artificial Sequence
  Description of Artificial Sequence: Synthetic oligonucleotide
cgagtgcctgcgatt

SEQ ID NO: 543 - DNA, 15 bp, Artificial Sequence
  Description of Artificial Sequence: Synthetic oligonucleotide
acctctgcctaggaa

SEQ ID NO: 544 - DNA, 15 bp, Artificial Sequence
  Description of Artificial Sequence: Synthetic oligonucleotide
cgccacgcctgactg

SEQ ID NO: 545 - DNA, 15 bp, Artificial Sequence
  Description of Artificial Sequence: Synthetic oligonucleotide
ccttggcctcccaaa

SEQ ID NO: 546 - DNA, 15 bp, Artificial Sequence
  Description of Artificial Sequence: Synthetic oligonucleotide
tcaataaatactaaa

SEQ ID NO: 547 - DNA, 15 bp, Artificial Sequence
  Description of Artificial Sequence: Synthetic oligonucleotide
aaaattaaaaaaaaa

SEQ ID NO: 548 - DNA, 15 bp, Artificial Sequence
  Description of Artificial Sequence: Synthetic oligonucleotide
ctcagtgctcaatgg

SEQ ID NO: 549 - DNA, 15 bp, Artificial Sequence
  Description of Artificial Sequence: Synthetic oligonucleotide
cgtctctgcctggcc

SEQ ID NO: 550 - DNA, 15 bp, Artificial Sequence
  Description of Artificial Sequence: Synthetic oligonucleotide
actgccgccatctcg

SEQ ID NO: 551 - DNA, 15 bp, Artificial Sequence
  Description of Artificial Sequence: Synthetic oligonucleotide
ttgttgctgtgtctg

SEQ ID NO: 552 - DNA, 15 bp, Artificial Sequence
  Description of Artificial Sequence: Synthetic oligonucleotide
tcggattgttgctgt

SEQ ID NO: 553 - DNA, 15 bp, Artificial Sequence
  Description of Artificial Sequence: Synthetic oligonucleotide
cctgttgatctgtga

SEQ ID NO: 554 - DNA, 15 bp, Artificial Sequence
  Description of Artificial Sequence: Synthetic oligonucleotide
cttcccggccgccat

SEQ ID NO: 555 - DNA, 15 bp, Artificial Sequence
  Description of Artificial Sequence: Synthetic oligonucleotide
ataggagactccatt

SEQ ID NO: 556 - DNA, 15 bp, Artificial Sequence
  Description of Artificial Sequence: Synthetic oligonucleotide
gccaccccgtctggg

SEQ ID NO: 557 - DNA, 15 bp, Artificial Sequence
  Description of Artificial Sequence: Synthetic oligonucleotide
tgtggaatagaaagg

SEQ ID NO: 558 - DNA, 15 bp, Artificial Sequence
  Description of Artificial Sequence: Synthetic oligonucleotide
ccgcagggacctctg

SEQ ID NO: 559 - DNA, 15 bp, Artificial Sequence
  Description of Artificial Sequence: Synthetic oligonucleotide
cgcctccgcccggcc

SEQ ID NO: 560 - DNA, 15 bp, Artificial Sequence
  Description of Artificial Sequence: Synthetic oligonucleotide
ccctaatctcaagta

SEQ ID NO: 561 - DNA, 15 bp, Artificial Sequence
  Description of Artificial Sequence: Synthetic oligonucleotide
agacatgggagactt

SEQ ID NO: 562 - DNA, 15 bp, Artificial Sequence
  Description of Artificial Sequence: Synthetic oligonucleotide
atctcaagtacccag

SEQ ID NO: 563 - DNA, 15 bp, Artificial Sequence
  Description of Artificial Sequence: Synthetic oligonucleotide
acactgcggaaggcc

SEQ ID NO: 564 - DNA, 15 bp, Artificial Sequence
  Description of Artificial Sequence: Synthetic oligonucleotide
ttgccgggtctgtgt

SEQ ID NO: 565 - DNA, 15 bp, Artificial Sequence
  Description of Artificial Sequence: Synthetic oligonucleotide
tcgctgtgttgaccg

SEQ ID NO: 566 - DNA, 15 bp, Artificial Sequence
  Description of Artificial Sequence: Synthetic oligonucleotide
cccagggacacaaac

SEQ ID NO: 567 - DNA, 15 bp, Artificial Sequence
  Description of Artificial Sequence: Synthetic oligonucleotide
ctgccttgggatcct

SEQ ID NO: 568 - DNA, 15 bp, Artificial Sequence
  Description of Artificial Sequence: Synthetic oligonucleotide
gggccatgatgacaa

SEQ ID NO: 569 - DNA, 15 bp, Artificial Sequence
  Description of Artificial Sequence: Synthetic oligonucleotide
tgcctgggattgcag

SEQ ID NO: 570 - DNA, 15 bp, Artificial Sequence
  Description of Artificial Sequence: Synthetic oligonucleotide
ctgtgtctgtgtaga

SEQ ID NO: 571 - DNA, 15 bp, Artificial Sequence
  Description of Artificial Sequence: Synthetic oligonucleotide
tccattttgttctgt

SEQ ID NO: 572 - DNA, 15 bp, Artificial Sequence
  Description of Artificial Sequence: Synthetic oligonucleotide
atggttgccgggtct

SEQ ID NO: 573 - DNA, 15 bp, Artificial Sequence
  Description of Artificial Sequence: Synthetic oligonucleotide
cgggaggtggggggg

SEQ ID NO: 574 - DNA, 15 bp, Artificial Sequence
  Description of Artificial Sequence: Synthetic oligonucleotide
aaatgtggggaaaag

SEQ ID NO: 575 - DNA, 15 bp, Artificial Sequence
  Description of Artificial Sequence: Synthetic oligonucleotide
ctcggcctgccgagt

SEQ ID NO: 576 - DNA, 15 bp, Artificial Sequence
  Description of Artificial Sequence: Synthetic oligonucleotide
tgccatctcggctca

SEQ ID NO: 577 - DNA, 15 bp, Artificial Sequence
  Description of Artificial Sequence: Synthetic oligonucleotide
ccaaagtgccgagat

SEQ ID NO: 578 - DNA, 15 bp, Artificial Sequence
  Description of Artificial Sequence: Synthetic oligonucleotide
ccgccccttctggga

SEQ ID NO: 579 - DNA, 15 bp, Artificial Sequence
  Description of Artificial Sequence: Synthetic oligonucleotide
ggaaaagatagagaa

SEQ ID NO: 580 - DNA, 15 bp, Artificial Sequence
  Description of Artificial Sequence: Synthetic oligonucleotide
ggtggggaaaagata

SEQ ID NO: 581 - DNA, 15 bp, Artificial Sequence
  Description of Artificial Sequence: Synthetic oligonucleotide
tgctgtgtcaactca

SEQ ID NO: 582 - DNA, 15 bp, Artificial Sequence
  Description of Artificial Sequence: Synthetic oligonucleotide
cttttcattttgttc

SEQ ID NO: 583 - DNA, 15 bp, Artificial Sequence
  Description of Artificial Sequence: Synthetic oligonucleotide
gacataggagactcc

SEQ ID NO: 584 - DNA, 15 bp, Artificial Sequence
  Description of Artificial Sequence: Synthetic oligonucleotide
cccgtctgggaggtg

SEQ ID NO: 585 - DNA, 15 bp, Artificial Sequence
  Description of Artificial Sequence: Synthetic oligonucleotide
gggaaaaaattgaga

SEQ ID NO: 586 - DNA, 15 bp, Artificial Sequence
  Description of Artificial Sequence: Synthetic oligonucleotide
gactgtactgccgcc

SEQ ID NO: 587 - DNA, 15 bp, Artificial Sequence
  Description of Artificial Sequence: Synthetic oligonucleotide
ccccgtgctctctga

SEQ ID NO: 588 - DNA, 15 bp, Artificial Sequence
  Description of Artificial Sequence: Synthetic oligonucleotide
gattctcctgcctcg

SEQ ID NO: 589 - DNA, 15 bp, Artificial Sequence
  Description of Artificial Sequence: Synthetic oligonucleotide
ccggccgccaccccg

SEQ ID NO: 590 - DNA, 15 bp, Artificial Sequence
  Description of Artificial Sequence: Synthetic oligonucleotide
ggtggggaaaagatt

SEQ ID NO: 591 - DNA, 15 bp, Artificial Sequence
  Description of Artificial Sequence: Synthetic oligonucleotide
gccgaagctggactg

SEQ ID NO: 592 - DNA, 15 bp, Artificial Sequence
  Description of Artificial Sequence: Synthetic oligonucleotide
acagatgcttgaagg

SEQ ID NO: 593 - DNA, 15 bp, Artificial Sequence
  Description of Artificial Sequence: Synthetic oligonucleotide
ggtttttgtattttt

SEQ ID NO: 594 - DNA, 15 bp, Artificial Sequence
  Description of Artificial Sequence: Synthetic oligonucleotide
attaagggcggtgca

SEQ ID NO: 595 - DNA, 15 bp, Artificial Sequence
  Description of Artificial Sequence: Synthetic oligonucleotide
ggagtctggttcact

SEQ ID NO: 596 - DNA, 15 bp, Artificial Sequence
  Description of Artificial Sequence: Synthetic oligonucleotide
gtattttttggtgga

SEQ ID NO: 597 - DNA, 15 bp, Artificial Sequence
  Description of Artificial Sequence: Synthetic oligonucleotide
ccgggaggaggtggg

SEQ ID NO: 598 - DNA, 15 bp, Artificial Sequence
  Description of Artificial Sequence: Synthetic oligonucleotide
tggagtgcagtggcg

SEQ ID NO: 599 - DNA, 15 bp, Artificial Sequence
  Description of Artificial Sequence: Synthetic oligonucleotide
aaatactaaaaaaaa

SEQ ID NO: 600 - DNA, 15 bp, Artificial Sequence
  Description of Artificial Sequence: Synthetic oligonucleotide
atccccaaccctgtg

SEQ ID NO: 601 - DNA, 15 bp, Artificial Sequence
  Description of Artificial Sequence: Synthetic oligonucleotide
ccgtccgggaggagg

SEQ ID NO: 602 - DNA, 15 bp, Artificial Sequence
  Description of Artificial Sequence: Synthetic oligonucleotide
gcccggccgcccagt

SEQ ID NO: 603 - DNA, 15 bp, Artificial Sequence
  Description of Artificial Sequence: Synthetic oligonucleotide
agaacgggccatgat

SEQ ID NO: 604 - DNA, 15 bp, Artificial Sequence
  Description of Artificial Sequence: Synthetic oligonucleotide
agcgcctcttcccgg

SEQ ID NO: 605 - DNA, 15 bp, Artificial Sequence
  Description of Artificial Sequence: Synthetic oligonucleotide
ctttgttcacgtgtt

SEQ ID NO: 606 - DNA, 15 bp, Artificial Sequence
  Description of Artificial Sequence: Synthetic oligonucleotide
ggaaaaaattgagaa

SEQ ID NO: 607 - DNA, 15 bp, Artificial Sequence
  Description of Artificial Sequence: Synthetic oligonucleotide
tgtactgccgccatc

SEQ ID NO: 608 - DNA, 15 bp, Artificial Sequence
  Description of Artificial Sequence: Synthetic oligonucleotide
agccgcctgccttgg

SEQ ID NO: 609 - DNA, 15 bp, Artificial Sequence
  Description of Artificial Sequence: Synthetic oligonucleotide
aaagaaagagagatc

SEQ ID NO: 610 - DNA, 15 bp, Artificial Sequence
  Description of Artificial Sequence: Synthetic oligonucleotide
gcgtctctgcccggc

SEQ ID NO: 611 - DNA, 15 bp, Artificial Sequence
  Description of Artificial Sequence: Synthetic oligonucleotide
tggatagaagtagac

SEQ ID NO: 612 - DNA, 15 bp, Artificial Sequence
  Description of Artificial Sequence: Synthetic oligonucleotide
atgtggggagcacct

SEQ ID NO: 613 - DNA, 15 bp, Artificial Sequence
  Description of Artificial Sequence: Synthetic oligonucleotide
gacacaaacactgcg

SEQ ID NO: 614 - DNA, 15 bp, Artificial Sequence
  Description of Artificial Sequence: Synthetic oligonucleotide
tccagctcctggcct

SEQ ID NO: 615 - DNA, 15 bp, Artificial Sequence
  Description of Artificial Sequence: Synthetic oligonucleotide
ggatgacaatggcgg

SEQ ID NO: 616 - DNA, 15 bp, Artificial Sequence
  Description of Artificial Sequence: Synthetic oligonucleotide
aattcttctgccttg

SEQ ID NO: 617 - DNA, 15 bp, Artificial Sequence
  Description of Artificial Sequence: Synthetic oligonucleotide
gatcaataaaaaaaa

SEQ ID NO: 618 - DNA, 15 bp, Artificial Sequence
  Description of Artificial Sequence: Synthetic oligonucleotide
ctaatctcaagtacc

SEQ ID NO: 619 - DNA, 15 bp, Artificial Sequence
  Description of Artificial Sequence: Synthetic oligonucleotide
acaaccacctcccag

SEQ ID NO: 620 - DNA, 15 bp, Artificial Sequence
  Description of Artificial Sequence: Synthetic oligonucleotide
gcccctaaccgcgag

SEQ ID NO: 621 - DNA, 15 bp, Artificial Sequence
  Description of Artificial Sequence: Synthetic oligonucleotide
gactggttttcgtat

SEQ ID NO: 622 - DNA, 15 bp, Artificial Sequence
  Description of Artificial Sequence: Synthetic oligonucleotide
cgggccatgatgaca

SEQ ID NO: 623 - DNA, 15 bp, Artificial Sequence
  Description of Artificial Sequence: Synthetic oligonucleotide
ctcctgcctcggcct

SEQ ID NO: 624 - DNA, 15 bp, Artificial Sequence
  Description of Artificial Sequence: Synthetic oligonucleotide
cgggccatgatgacg

SEQ ID NO: 625 - DNA, 15 bp, Artificial Sequence
  Description of Artificial Sequence: Synthetic oligonucleotide
ccctctcatgcggag

SEQ ID NO: 626 - DNA, 15 bp, Artificial Sequence
  Description of Artificial Sequence: Synthetic oligonucleotide
tagaaaggcgggaaa

SEQ ID NO: 627 - DNA, 15 bp, Artificial Sequence
  Description of Artificial Sequence: Synthetic oligonucleotide
tagaaaggcgggaag

SEQ ID NO: 628 - DNA, 15 bp, Artificial Sequence
  Description of Artificial Sequence: Synthetic oligonucleotide
atctcggctcactgc

SEQ ID NO: 629 - DNA, 15 bp, Artificial Sequence
  Description of Artificial Sequence: Synthetic oligonucleotide
tcccggccgccatcc

SEQ ID NO: 630 - DNA, 15 bp, Artificial Sequence
  Description of Artificial Sequence: Synthetic oligonucleotide
ggaggtgggggggtc

SEQ ID NO: 631 - DNA, 15 bp, Artificial Sequence
  Description of Artificial Sequence: Synthetic oligonucleotide
gttgccgaggctgga

SEQ ID NO: 632 - DNA, 15 bp, Artificial Sequence
  Description of Artificial Sequence: Synthetic oligonucleotide
ctcgttaagagtcat

SEQ ID NO: 633 - DNA, 15 bp, Artificial Sequence
  Description of Artificial Sequence: Synthetic oligonucleotide
tctgatgccgagcca

SEQ ID NO: 634 - DNA, 15 bp, Artificial Sequence
  Description of Artificial Sequence: Synthetic oligonucleotide
atgatgacgatggcg

SEQ ID NO: 635 - DNA, 15 bp, Artificial Sequence
  Description of Artificial Sequence: Synthetic oligonucleotide
tctgatgccgagccg

SEQ ID NO: 636 - DNA, 15 bp, Artificial Sequence
  Description of Artificial Sequence: Synthetic oligonucleotide
ccttctgggaagtga

SEQ ID NO: 637 - DNA, 15 bp, Artificial Sequence
  Description of Artificial Sequence: Synthetic oligonucleotide
actcagggttaaatg

SEQ ID NO: 638 - DNA, 15 bp, Artificial Sequence
  Description of Artificial Sequence: Synthetic oligonucleotide
attcttctgccttgg

SEQ ID NO: 639 - DNA, 15 bp, Artificial Sequence
  Description of Artificial Sequence: Synthetic oligonucleotide
tgcgagaaacaccca

SEQ ID NO: 640 - DNA, 15 bp, Artificial Sequence
  Description of Artificial Sequence: Synthetic oligonucleotide
gcctcccgaggtgct

SEQ ID NO: 641 - DNA, 15 bp, Artificial Sequence
  Description of Artificial Sequence: Synthetic oligonucleotide
tcacatgtttatctg

SEQ ID NO: 642 - DNA, 15 bp, Artificial Sequence
  Description of Artificial Sequence: Synthetic oligonucleotide
ggattaagggcggtg

SEQ ID NO: 643 - DNA, 15 bp, Artificial Sequence
  Description of Artificial Sequence: Synthetic oligonucleotide
ccactcagggttaaa

SEQ ID NO: 644 - DNA, 15 bp, Artificial Sequence
  Description of Artificial Sequence: Synthetic oligonucleotide
ttgttaaacagatgc

SEQ ID NO: 645 - DNA, 15 bp, Artificial Sequence
  Description of Artificial Sequence: Synthetic oligonucleotide
gcctcccgaggtgcc

SEQ ID NO: 646 - DNA, 15 bp, Artificial Sequence
  Description of Artificial Sequence: Synthetic oligonucleotide
atcccgtctgggaag

SEQ ID NO: 647 - DNA, 15 bp, Artificial Sequence
  Description of Artificial Sequence: Synthetic oligonucleotide
ggaggtgtacccaac

SEQ ID NO: 648 - DNA, 15 bp, Artificial Sequence
  Description of Artificial Sequence: Synthetic oligonucleotide
tttctacggtctccc

SEQ ID NO: 649 - DNA, 15 bp, Artificial Sequence
  Description of Artificial Sequence: Synthetic oligonucleotide
ctgtgtagaaagagg

SEQ ID NO: 650 - DNA, 15 bp, Artificial Sequence
  Description of Artificial Sequence: Synthetic oligonucleotide
actccctaatcttaa

SEQ ID NO: 651 - DNA, 15 bp, Artificial Sequence
  Description of Artificial Sequence: Synthetic oligonucleotide
aacctccacctccca

SEQ ID NO: 652 - DNA, 15 bp, Artificial Sequence
  Description of Artificial Sequence: Synthetic oligonucleotide
ttttgttctgtacta

SEQ ID NO: 653 - DNA, 15 bp, Artificial Sequence
  Description of Artificial Sequence: Synthetic oligonucleotide
tcggatggttgccgt

SEQ ID NO: 654 - DNA, 15 bp, Artificial Sequence
  Description of Artificial Sequence: Synthetic oligonucleotide
cagcctctgcccggc

SEQ ID NO: 655 - DNA, 15 bp, Artificial Sequence
  Description of Artificial Sequence: Synthetic oligonucleotide
gccagccgccccgtc

SEQ ID NO: 656 - DNA, 15 bp, Artificial Sequence
  Description of Artificial Sequence: Synthetic oligonucleotide
gtcaactcagggtta

SEQ ID NO: 657 - DNA, 15 bp, Artificial Sequence
  Description of Artificial Sequence: Synthetic oligonucleotide
aagaaaagggggaaa

SEQ ID NO: 658 - DNA, 15 bp, Artificial Sequence
  Description of Artificial Sequence: Synthetic oligonucleotide
ccctaatcttaagta

SEQ ID NO: 659 - DNA, 15 bp, Artificial Sequence
  Description of Artificial Sequence: Synthetic oligonucleotide
agtagacataggaga

SEQ ID NO: 660 - DNA, 15 bp, Artificial Sequence
  Description of Artificial Sequence: Synthetic oligonucleotide
gccgggccggtctcc

SEQ ID NO: 661 - DNA, 15 bp, Artificial Sequence
  Description of Artificial Sequence: Synthetic oligonucleotide
cggtctccctctgtt

SEQ ID NO: 662 - DNA, 15 bp, Artificial Sequence
  Description of Artificial Sequence: Synthetic oligonucleotide
tactaagaaaaattc

SEQ ID NO: 663 - DNA, 15 bp, Artificial Sequence
  Description of Artificial Sequence: Synthetic oligonucleotide
ggttttcgtattttt

SEQ ID NO: 664 - DNA, 15 bp, Artificial Sequence
  Description of Artificial Sequence: Synthetic oligonucleotide
aggaagtgaggagcg

SEQ ID NO: 665 - DNA, 15 bp, Artificial Sequence
  Description of Artificial Sequence: Synthetic oligonucleotide
cagtctgggaagtga

SEQ ID NO: 666 - DNA, 15 bp, Artificial Sequence
  Description of Artificial Sequence: Synthetic oligonucleotide
acatgggagacttca

SEQ ID NO: 667 - DNA, 15 bp, Artificial Sequence
  Description of Artificial Sequence: Synthetic oligonucleotide
caccactccctaatc

SEQ ID NO: 668 - DNA, 15 bp, Artificial Sequence
  Description of Artificial Sequence: Synthetic oligonucleotide
tcgctacaaccacct

SEQ ID NO: 669 - DNA, 15 bp, Artificial Sequence
  Description of Artificial Sequence: Synthetic oligonucleotide
gtcatcaccactccc

SEQ ID NO: 670 - DNA, 15 bp, Artificial Sequence
  Description of Artificial Sequence: Synthetic oligonucleotide
tggactgtactgctg

SEQ ID NO: 671 - DNA, 15 bp, Artificial Sequence
  Description of Artificial Sequence: Synthetic oligonucleotide
ggcctcccaaagagc

SEQ ID NO: 672 - DNA, 15 bp, Artificial Sequence
  Description of Artificial Sequence: Synthetic oligonucleotide
ttcgctgtgttgacc

SEQ ID NO: 673 - DNA, 15 bp, Artificial Sequence
  Description of Artificial Sequence: Synthetic oligonucleotide
tcgttaagagtcatc

SEQ ID NO: 674 - DNA, 15 bp, Artificial Sequence
  Description of Artificial Sequence: Synthetic oligonucleotide
gaaaagaaagagaga

SEQ ID NO: 675 - DNA, 15 bp, Artificial Sequence
  Description of Artificial Sequence: Synthetic oligonucleotide
ggatgggccatgatg

SEQ ID NO: 676 - DNA, 15 bp, Artificial Sequence
  Description of Artificial Sequence: Synthetic oligonucleotide
ccgagccaaagctgg

SEQ ID NO: 677 - DNA, 15 bp, Artificial Sequence
  Description of Artificial Sequence: Synthetic oligonucleotide
cctctccctgtcccc

SEQ ID NO: 678 - DNA, 15 bp, Artificial Sequence
  Description of Artificial Sequence: Synthetic oligonucleotide
tttgttcacatgttt

SEQ ID NO: 679 - DNA, 15 bp, Artificial Sequence
  Description of Artificial Sequence: Synthetic oligonucleotide
ggccgcccctactgg

SEQ ID NO: 680 - DNA, 15 bp, Artificial Sequence
  Description of Artificial Sequence: Synthetic oligonucleotide
ctgccgagtgcctgc

SEQ ID NO: 681 - DNA, 15 bp, Artificial Sequence
  Description of Artificial Sequence: Synthetic oligonucleotide
ggccaggatgacaat

SEQ ID NO: 682 - DNA, 15 bp, Artificial Sequence
  Description of Artificial Sequence: Synthetic oligonucleotide
acggggtttcgctgt

SEQ ID NO: 683 - DNA, 15 bp, Artificial Sequence
  Description of Artificial Sequence: Synthetic oligonucleotide
catgaccctgccaaa

SEQ ID NO: 684 - DNA, 15 bp, Artificial Sequence
  Description of Artificial Sequence: Synthetic oligonucleotide
gtgagaaacacccaa

SEQ ID NO: 685 - DNA, 15 bp, Artificial Sequence
  Description of Artificial Sequence: Synthetic oligonucleotide
cctgtgctctctgaa

SEQ ID NO: 686 - DNA, 15 bp, Artificial Sequence
  Description of Artificial Sequence: Synthetic oligonucleotide
agtaatcagggacac

SEQ ID NO: 687 - DNA, 15 bp, Artificial Sequence
  Description of Artificial Sequence: Synthetic oligonucleotide
ccaaccctgtgctct

SEQ ID NO: 688 - DNA, 15 bp, Artificial Sequence
  Description of Artificial Sequence: Synthetic oligonucleotide
tgagaaatcggatgg

SEQ ID NO: 689 - DNA, 15 bp, Artificial Sequence
  Description of Artificial Sequence: Synthetic oligonucleotide
ccactccctaatctt

SEQ ID NO: 690 - DNA, 15 bp, Artificial Sequence
  Description of Artificial Sequence: Synthetic oligonucleotide
tgctttgttaaacag

SEQ ID NO: 691 - DNA, 15 bp, Artificial Sequence
  Description of Artificial Sequence: Synthetic oligonucleotide
tcaatgttgcccagg

SEQ ID NO: 692 - DNA, 15 bp, Artificial Sequence
  Description of Artificial Sequence: Synthetic oligonucleotide
cccctctctccacgg

SEQ ID NO: 693 - DNA, 15 bp, Artificial Sequence
  Description of Artificial Sequence: Synthetic oligonucleotide
cctctcatgcggagc

SEQ ID NO: 694 - DNA, 15 bp, Artificial Sequence
  Description of Artificial Sequence: Synthetic oligonucleotide
tggcctcgagtgatc

SEQ ID NO: 695 - DNA, 15 bp, Artificial Sequence
  Description of Artificial Sequence: Synthetic oligonucleotide
caaccccgtgctctc

SEQ ID NO: 696 - DNA, 15 bp, Artificial Sequence
  Description of Artificial Sequence: Synthetic oligonucleotide
ccactccctaatctc

SEQ ID NO: 697 - DNA, 15 bp, Artificial Sequence
  Description of Artificial Sequence: Synthetic oligonucleotide
aataaatactaaaaa

SEQ ID NO: 698 - DNA, 15 bp, Artificial Sequence
  Description of Artificial Sequence: Synthetic oligonucleotide
cgtgctctctgaaac

SEQ ID NO: 699 - DNA, 15 bp, Artificial Sequence
  Description of Artificial Sequence: Synthetic oligonucleotide
gccccgtctgggagg

SEQ ID NO: 700 - DNA, 15 bp, Artificial Sequence
  Description of Artificial Sequence: Synthetic oligonucleotide
atgaccctgccaaat

SEQ ID NO: 701 - DNA, 15 bp, Artificial Sequence
  Description of Artificial Sequence: Synthetic oligonucleotide
tgaggagcgcctctg

SEQ ID NO: 702 - DNA, 15 bp, Artificial Sequence
  Description of Artificial Sequence: Synthetic oligonucleotide
gaggtgaggggcgcc

SEQ ID NO: 703 - DNA, 15 bp, Artificial Sequence
  Description of Artificial Sequence: Synthetic oligonucleotide
aatcagggacacaaa

SEQ ID NO: 704 - DNA, 15 bp, Artificial Sequence
  Description of Artificial Sequence: Synthetic oligonucleotide
tgaggagcgcctctt

SEQ ID NO: 705 - DNA, 15 bp, Artificial Sequence
  Description of Artificial Sequence: Synthetic oligonucleotide
ctgggattgcagacg

SEQ ID NO: 706 - DNA, 15 bp, Artificial Sequence
  Description of Artificial Sequence: Synthetic oligonucleotide
gcccatcgtctgaga

SEQ ID NO: 707 - DNA, 15 bp, Artificial Sequence
  Description of Artificial Sequence: Synthetic oligonucleotide
tgcctaggaaaacca

SEQ ID NO: 708 - DNA, 15 bp, Artificial Sequence
  Description of Artificial Sequence: Synthetic oligonucleotide
cccatctaggaagtg

SEQ ID NO: 709 - DNA, 15 bp, Artificial Sequence
  Description of Artificial Sequence: Synthetic oligonucleotide
gaaggccgcagggtc

SEQ ID NO: 710 - DNA, 15 bp, Artificial Sequence
  Description of Artificial Sequence: Synthetic oligonucleotide
ggattgcaggcgcgc

SEQ ID NO: 711 - DNA, 15 bp, Artificial Sequence
  Description of Artificial Sequence: Synthetic oligonucleotide
caataaaaaaaaaaa

SEQ ID NO: 712 - DNA, 15 bp, Artificial Sequence
  Description of Artificial Sequence: Synthetic oligonucleotide
gctggagtgcagtgg

SEQ ID NO: 713 - DNA, 15 bp, Artificial Sequence
  Description of Artificial Sequence: Synthetic oligonucleotide
gcccggccgcccctt

SEQ ID NO: 714 - DNA, 15 bp, Artificial Sequence
  Description of Artificial Sequence: Synthetic oligonucleotide
ggctcattggggatg

SEQ ID NO: 715 - DNA, 15 bp, Artificial Sequence
  Description of Artificial Sequence: Synthetic oligonucleotide
tgccgccatctcggc

SEQ ID NO: 716 - DNA, 15 bp, Artificial Sequence
  Description of Artificial Sequence: Synthetic oligonucleotide
agaggtagacatggg

SEQ ID NO: 717 - DNA, 15 bp, Artificial Sequence
  Description of Artificial Sequence: Synthetic oligonucleotide
ggcggctttgtggaa

SEQ ID NO: 718 - DNA, 15 bp, Artificial Sequence
  Description of Artificial Sequence: Synthetic oligonucleotide
cagctcctggcctcg

SEQ ID NO: 719 - DNA, 15 bp, Artificial Sequence
  Description of Artificial Sequence: Synthetic oligonucleotide
tcgtatttttttggt

SEQ ID NO: 720 - DNA, 15 bp, Artificial Sequence
  Description of Artificial Sequence: Synthetic oligonucleotide
gtgcctgcgattgca

SEQ ID NO: 721 - DNA, 15 bp, Artificial Sequence
  Description of Artificial Sequence: Synthetic oligonucleotide
gaaatcggattgttg

SEQ ID NO: 722 - DNA, 15 bp, Artificial Sequence
  Description of Artificial Sequence: Synthetic oligonucleotide
aatggcggctttgtg

SEQ ID NO: 723 - DNA, 15 bp, Artificial Sequence
  Description of Artificial Sequence: Synthetic oligonucleotide
gaaaggggggaaagg

SEQ ID NO: 724 - DNA, 15 bp, Artificial Sequence
  Description of Artificial Sequence: Synthetic oligonucleotide
gccgagccgaggctg

SEQ ID NO: 725 - DNA, 15 bp, Artificial Sequence
  Description of Artificial Sequence: Synthetic oligonucleotide
cactccctaatctca

SEQ ID NO: 726 - DNA, 15 bp, Artificial Sequence
  Description of Artificial Sequence: Synthetic oligonucleotide
ttgccgaggctggac

SEQ ID NO: 727 - DNA, 15 bp, Artificial Sequence
  Description of Artificial Sequence: Synthetic oligonucleotide
tgtcgaaaagaaaag

SEQ ID NO: 728 - DNA, 15 bp, Artificial Sequence
  Description of Artificial Sequence: Synthetic oligonucleotide
cgctgcaacctccct

SEQ ID NO: 729 - DNA, 15 bp, Artificial Sequence
  Description of Artificial Sequence: Synthetic oligonucleotide
gcctgcgattgcagg

SEQ ID NO: 730 - DNA, 15 bp, Artificial Sequence
  Description of Artificial Sequence: Synthetic oligonucleotide
gatagaagtagacat

SEQ ID NO: 731 - DNA, 15 bp, Artificial Sequence
  Description of Artificial Sequence: Synthetic oligonucleotide
cctgccttggcctcc

SEQ ID NO: 732 - DNA, 15 bp, Artificial Sequence
  Description of Artificial Sequence: Synthetic oligonucleotide
tctccagctcctaac

SEQ ID NO: 733 - DNA, 15 bp, Artificial Sequence
  Description of Artificial Sequence: Synthetic oligonucleotide
ggctcactgcaacct

SEQ ID NO: 734 - DNA, 15 bp, Artificial Sequence
  Description of Artificial Sequence: Synthetic oligonucleotide
atagaaaggggggaa

SEQ ID NO: 735 - DNA, 15 bp, Artificial Sequence
  Description of Artificial Sequence: Synthetic oligonucleotide
ggccgccatcccatc

SEQ ID NO: 736 - DNA, 15 bp, Artificial Sequence
  Description of Artificial Sequence: Synthetic oligonucleotide
taatcagggacacaa

SEQ ID NO: 737 - DNA, 15 bp, Artificial Sequence
  Description of Artificial Sequence: Synthetic oligonucleotide
cgctcactcagtgct

SEQ ID NO: 738 - DNA, 15 bp, Artificial Sequence
  Description of Artificial Sequence: Synthetic oligonucleotide
agaagtagacatagg

SEQ ID NO: 739 - DNA, 15 bp, Artificial Sequence
  Description of Artificial Sequence: Synthetic oligonucleotide
aatggtgcccaggct

SEQ ID NO: 740 - DNA, 15 bp, Artificial Sequence
  Description of Artificial Sequence: Synthetic oligonucleotide
cccaagaatgatcaa

SEQ ID NO: 741 - DNA, 15 bp, Artificial Sequence
  Description of Artificial Sequence: Synthetic oligonucleotide
tgtgagaaacaccca

SEQ ID NO: 742 - DNA, 15 bp, Artificial Sequence
  Description of Artificial Sequence: Synthetic oligonucleotide
cactcagtgctcaat

SEQ ID NO: 743 - DNA, 15 bp, Artificial Sequence
  Description of Artificial Sequence: Synthetic oligonucleotide
gtgctgtgtccactc

SEQ ID NO: 744 - DNA, 15 bp, Artificial Sequence
  Description of Artificial Sequence: Synthetic oligonucleotide
ccctctttccacggt

SEQ ID NO: 745 - DNA, 15 bp, Artificial Sequence
  Description of Artificial Sequence: Synthetic oligonucleotide
tgctgccatctcggc

SEQ ID NO: 746 - DNA, 15 bp, Artificial Sequence
  Description of Artificial Sequence: Synthetic oligonucleotide
ggggtttcgccgtgt

SEQ ID NO: 747 - DNA, 15 bp, Artificial Sequence
  Description of Artificial Sequence: Synthetic oligonucleotide
cggttttgtcgaata

SEQ ID NO: 748 - DNA, 15 bp, Artificial Sequence
  Description of Artificial Sequence: Synthetic oligonucleotide
tgatgccgagccgag

SEQ ID NO: 749 - DNA, 15 bp, Artificial Sequence
  Description of Artificial Sequence: Synthetic oligonucleotide
tgatgccgagccgaa

SEQ ID NO: 750 - DNA, 15 bp, Artificial Sequence
  Description of Artificial Sequence: Synthetic oligonucleotide
ctcaagtaatcaggg

SEQ ID NO: 751 - DNA, 15 bp, Artificial Sequence
  Description of Artificial Sequence: Synthetic oligonucleotide
aagctggacggtact

SEQ ID NO: 752 - DNA, 15 bp, Artificial Sequence
  Description of Artificial Sequence: Synthetic oligonucleotide
ctgaaacatgtgctg

SEQ ID NO: 753 - DNA, 15 bp, Artificial Sequence
  Description of Artificial Sequence: Synthetic oligonucleotide
agcgaccattgagaa

SEQ ID NO: 754 - DNA, 15 bp, Artificial Sequence
  Description of Artificial Sequence: Synthetic oligonucleotide
ccctctgtgagaaac

SEQ ID NO: 755 - DNA, 15 bp, Artificial Sequence
  Description of Artificial Sequence: Synthetic oligonucleotide
atctcggctcgctgc

SEQ ID NO: 756 - DNA, 15 bp, Artificial Sequence
  Description of Artificial Sequence: Synthetic oligonucleotide
cagcatgctcgttaa

SEQ ID NO: 757 - DNA, 15 bp, Artificial Sequence
  Description of Artificial Sequence: Synthetic oligonucleotide
atactaaaaaaaaaa

SEQ ID NO: 758 - DNA, 15 bp, Artificial Sequence
  Description of Artificial Sequence: Synthetic oligonucleotide
tgccgagattgcagc

SEQ ID NO: 759 - DNA, 15 bp, Artificial Sequence
  Description of Artificial Sequence: Synthetic oligonucleotide
atctataaccttacc

SEQ ID NO: 760 - DNA, 15 bp, Artificial Sequence
  Description of Artificial Sequence: Synthetic oligonucleotide
gagactccattttgt

SEQ ID NO: 761 - DNA, 15 bp, Artificial Sequence
  Description of Artificial Sequence: Synthetic oligonucleotide
gcctcggcctcccga

SEQ ID NO: 762 - DNA, 15 bp, Artificial Sequence
  Description of Artificial Sequence: Synthetic oligonucleotide
ccgcccatcgtctga

SEQ ID NO: 763 - DNA, 15 bp, Artificial Sequence
  Description of Artificial Sequence: Synthetic oligonucleotide
gtccgggaggaggtg

SEQ ID NO: 764 - DNA, 15 bp, Artificial Sequence
  Description of Artificial Sequence: Synthetic oligonucleotide
tgctctctgaaacat

SEQ ID NO: 765 - DNA, 15 bp, Artificial Sequence
  Description of Artificial Sequence: Synthetic oligonucleotide
ggaggtgtacccagc

SEQ ID NO: 766 - DNA, 15 bp, Artificial Sequence
  Description of Artificial Sequence: Synthetic oligonucleotide
gggatgctgttgatc

SEQ ID NO: 767 - DNA, 15 bp, Artificial Sequence
  Description of Artificial Sequence: Synthetic oligonucleotide
gagccgaagctggac

SEQ ID NO: 768 - DNA, 15 bp, Artificial Sequence
  Description of Artificial Sequence: Synthetic oligonucleotide
tctcccctctttcta

SEQ ID NO: 769 - DNA, 15 bp, Artificial Sequence
  Description of Artificial Sequence: Synthetic oligonucleotide
gagtgatccgccagc

SEQ ID NO: 770 - DNA, 15 bp, Artificial Sequence
  Description of Artificial Sequence: Synthetic oligonucleotide
gggaaaagaaagaga

SEQ ID NO: 771 - DNA, 15 bp, Artificial Sequence
  Description of Artificial Sequence: Synthetic oligonucleotide
tctgccttgggatgc

SEQ ID NO: 772 - DNA, 15 bp, Artificial Sequence
  Description of Artificial Sequence: Synthetic oligonucleotide
catgatgacaatggc

SEQ ID NO: 773 - DNA, 15 bp, Artificial Sequence
  Description of Artificial Sequence: Synthetic oligonucleotide
tcagggacacaaaca

SEQ ID NO: 774 - DNA, 15 bp, Artificial Sequence
  Description of Artificial Sequence: Synthetic oligonucleotide
ggccatgatgacaat

SEQ ID NO: 775 - DNA, 15 bp, Artificial Sequence
  Description of Artificial Sequence: Synthetic oligonucleotide
caagtaatcagggac

SEQ ID NO: 776 - DNA, 15 bp, Artificial Sequence
  Description of Artificial Sequence: Synthetic oligonucleotide
gcgaccattgagaac

SEQ ID NO: 777 - DNA, 15 bp, Artificial Sequence
  Description of Artificial Sequence: Synthetic oligonucleotide
ggcctcccgaggtgc

SEQ ID NO: 778 - DNA, 15 bp, Artificial Sequence
  Description of Artificial Sequence: Synthetic oligonucleotide
gagcgtctctgcctg

SEQ ID NO: 779 - DNA, 15 bp, Artificial Sequence
  Description of Artificial Sequence: Synthetic oligonucleotide
ctccctctcatgcgg

SEQ ID NO: 780 - DNA, 15 bp, Artificial Sequence
  Description of Artificial Sequence: Synthetic oligonucleotide
tgttggccgggctgg

SEQ ID NO: 781 - DNA, 15 bp, Artificial Sequence
  Description of Artificial Sequence: Synthetic oligonucleotide
ccctctccctctccc

SEQ ID NO: 782 - DNA, 15 bp, Artificial Sequence
  Description of Artificial Sequence: Synthetic oligonucleotide
aggagactccatttt

SEQ ID NO: 783 - DNA, 15 bp, Artificial Sequence
  Description of Artificial Sequence: Synthetic oligonucleotide
agaaacacccaagaa

SEQ ID NO: 784 - DNA, 15 bp, Artificial Sequence
  Description of Artificial Sequence: Synthetic oligonucleotide
gtggggggcgcctct

SEQ ID NO: 785 - DNA, 15 bp, Artificial Sequence
  Description of Artificial Sequence: Synthetic oligonucleotide
ccagagacctttgtt

SEQ ID NO: 786 - DNA, 15 bp, Artificial Sequence
  Description of Artificial Sequence: Synthetic oligonucleotide
ggtttcgctgtgttg

SEQ ID NO: 787 - DNA, 15 bp, Artificial Sequence
  Description of Artificial Sequence: Synthetic oligonucleotide
gaggtgtacccagcg

SEQ ID NO: 788 - DNA, 15 bp, Artificial Sequence
  Description of Artificial Sequence: Synthetic oligonucleotide
tggcggctttgtgga

SEQ ID NO: 789 - DNA, 15 bp, Artificial Sequence
  Description of Artificial Sequence: Synthetic oligonucleotide
gcccatcgtctggga

SEQ ID NO: 790 - DNA, 15 bp, Artificial Sequence
  Description of Artificial Sequence: Synthetic oligonucleotide
tgtggggagcgcctc

SEQ ID NO: 791 - DNA, 15 bp, Artificial Sequence
  Description of Artificial Sequence: Synthetic oligonucleotide
ccgtctgggaggagg

SEQ ID NO: 792 - DNA, 15 bp, Artificial Sequence
  Description of Artificial Sequence: Synthetic oligonucleotide
tatccccaaccctgt

SEQ ID NO: 793 - DNA, 15 bp, Artificial Sequence
  Description of Artificial Sequence: Synthetic oligonucleotide
tgtacccagcgacca

SEQ ID NO: 794 - DNA, 15 bp, Artificial Sequence
  Description of Artificial Sequence: Synthetic oligonucleotide
ctccctctccctgtc

SEQ ID NO: 795 - DNA, 15 bp, Artificial Sequence
  Description of Artificial Sequence: Synthetic oligonucleotide
ctcctaaccgcgagt

SEQ ID NO: 796 - DNA, 15 bp, Artificial Sequence
  Description of Artificial Sequence: Synthetic oligonucleotide
taatctcaagtaccc

SEQ ID NO: 797 - DNA, 15 bp, Artificial Sequence
  Description of Artificial Sequence: Synthetic oligonucleotide
ctcccaaagagccgg

SEQ ID NO: 798 - DNA, 15 bp, Artificial Sequence
  Description of Artificial Sequence: Synthetic oligonucleotide
tgcccggccaccacc

SEQ ID NO: 799 - DNA, 15 bp, Artificial Sequence
  Description of Artificial Sequence: Synthetic oligonucleotide
gcgggaaaggtgggg

SEQ ID NO: 800 - DNA, 15 bp, Artificial Sequence
  Description of Artificial Sequence: Synthetic oligonucleotide
ggaggtgaggggcgc

SEQ ID NO: 801 - DNA, 15 bp, Artificial Sequence
  Description of Artificial Sequence: Synthetic oligonucleotide
accagagacctttgt

SEQ ID NO: 802 - DNA, 15 bp, Artificial Sequence
  Description of Artificial Sequence: Synthetic oligonucleotide
gagccaaagctggac

SEQ ID NO: 803 - DNA, 15 bp, Artificial Sequence
  Description of Artificial Sequence: Synthetic oligonucleotide
gtgctgtgtcaactc

SEQ ID NO: 804 - DNA, 15 bp, Artificial Sequence
  Description of Artificial Sequence: Synthetic oligonucleotide
agcgtctctgcctgg

SEQ ID NO: 805 - DNA, 15 bp, Artificial Sequence
  Description of Artificial Sequence: Synthetic oligonucleotide
tgatctcggctcgct

SEQ ID NO: 806 - DNA, 15 bp, Artificial Sequence
  Description of Artificial Sequence: Synthetic oligonucleotide
tgttgctgtgtctgt

SEQ ID NO: 807 - DNA, 15 bp, Artificial Sequence
  Description of Artificial Sequence: Synthetic oligonucleotide
ccgggtctgtgtgga

SEQ ID NO: 808 - DNA, 15 bp, Artificial Sequence
  Description of Artificial Sequence: Synthetic oligonucleotide
ccggattgcagcctc

SEQ ID NO: 809 - DNA, 15 bp, Artificial Sequence
  Description of Artificial Sequence: Synthetic oligonucleotide
ttctctccactatta

SEQ ID NO: 810 - DNA, 15 bp, Artificial Sequence
  Description of Artificial Sequence: Synthetic oligonucleotide
ttgtatttttggtgg

SEQ ID NO: 811 - DNA, 15 bp, Artificial Sequence
  Description of Artificial Sequence: Synthetic oligonucleotide
cgatggcggttttgt

SEQ ID NO: 812 - DNA, 15 bp, Artificial Sequence
  Description of Artificial Sequence: Synthetic oligonucleotide
tgtgaccttaccccc

SEQ ID NO: 813 - DNA, 15 bp, Artificial Sequence
  Description of Artificial Sequence: Synthetic oligonucleotide
cctgtcccctctttc

SEQ ID NO: 814 - DNA, 15 bp, Artificial Sequence
  Description of Artificial Sequence: Synthetic oligonucleotide
cctctgttgccgagg

SEQ ID NO: 815 - DNA, 15 bp, Artificial Sequence
  Description of Artificial Sequence: Synthetic oligonucleotide
ttcacatgtttatct

SEQ ID NO: 816 - DNA, 15 bp, Artificial Sequence
  Description of Artificial Sequence: Synthetic oligonucleotide
ggaatagaaaggcgg

SEQ ID NO: 817 - DNA, 15 bp, Artificial Sequence
  Description of Artificial Sequence: Synthetic oligonucleotide
ttgggatgctgttga

SEQ ID NO: 818 - DNA, 15 bp, Artificial Sequence
  Description of Artificial Sequence: Synthetic oligonucleotide
attgcagcctctgcc

SEQ ID NO: 819 - DNA, 15 bp, Artificial Sequence
  Description of Artificial Sequence: Synthetic oligonucleotide
ggtcctctgcctagg

SEQ ID NO: 820 - DNA, 15 bp, Artificial Sequence
  Description of Artificial Sequence: Synthetic oligonucleotide
cggtctccctctcat

SEQ ID NO: 821 - DNA, 15 bp, Artificial Sequence
  Description of Artificial Sequence: Synthetic oligonucleotide
tgaccttctctccac

SEQ ID NO: 822 - DNA, 15 bp, Artificial Sequence
  Description of Artificial Sequence: Synthetic oligonucleotide
actgctgccatctcg

SEQ ID NO: 823 - DNA, 15 bp, Artificial Sequence
  Description of Artificial Sequence: Synthetic oligonucleotide
ggggaaaaaattgag

SEQ ID NO: 824 - DNA, 15 bp, Artificial Sequence
  Description of Artificial Sequence: Synthetic oligonucleotide
ggcctgccgagtgcc

SEQ ID NO: 825 - DNA, 15 bp, Artificial Sequence
  Description of Artificial Sequence: Synthetic oligonucleotide
ccagcctcggcctcc

SEQ ID NO: 826 - DNA, 15 bp, Artificial Sequence
  Description of Artificial Sequence: Synthetic oligonucleotide
attggggatgggcca

SEQ ID NO: 827 - DNA, 15 bp, Artificial Sequence
  Description of Artificial Sequence: Synthetic oligonucleotide
gttggccgggccggt

SEQ ID NO: 828 - DNA, 15 bp, Artificial Sequence
  Description of Artificial Sequence: Synthetic oligonucleotide
gtgctctctgaaaca

SEQ ID NO: 829 - DNA, 15 bp, Artificial Sequence
  Description of Artificial Sequence: Synthetic oligonucleotide
gattgcaggcacgcg

SEQ ID NO: 830 - DNA, 15 bp, Artificial Sequence
  Description of Artificial Sequence: Synthetic oligonucleotide
tcgctgtgttggccg

SEQ ID NO: 831 - DNA, 15 bp, Artificial Sequence
  Description of Artificial Sequence: Synthetic oligonucleotide
acgggccatgatgac

SEQ ID NO: 832 - DNA, 15 bp, Artificial Sequence
  Description of Artificial Sequence: Synthetic oligonucleotide
tatcaataaaaaaaa

SEQ ID NO: 833 - DNA, 15 bp, Artificial Sequence
  Description of Artificial Sequence: Synthetic oligonucleotide
ccatgatgacaatgg

SEQ ID NO: 834 - DNA, 15 bp, Artificial Sequence
  Description of Artificial Sequence: Synthetic oligonucleotide
tactgccgccatctc

SEQ ID NO: 835 - DNA, 15 bp, Artificial Sequence
  Description of Artificial Sequence: Synthetic oligonucleotide
cgcccagtctgggaa

SEQ ID NO: 836 - DNA, 15 bp, Artificial Sequence
  Description of Artificial Sequence: Synthetic oligonucleotide
tatctgctgaccttc

SEQ ID NO: 837 - DNA, 15 bp, Artificial Sequence
  Description of Artificial Sequence: Synthetic oligonucleotide
gccccttctgggaag

SEQ ID NO: 838 - DNA, 15 bp, Artificial Sequence
  Description of Artificial Sequence: Synthetic oligonucleotide
ctcattgagaacggg

SEQ ID NO: 839 - DNA, 15 bp, Artificial Sequence
  Description of Artificial Sequence: Synthetic oligonucleotide
tattgtcccatgacc

SEQ ID NO: 840 - DNA, 15 bp, Artificial Sequence
  Description of Artificial Sequence: Synthetic oligonucleotide
gccgggtctgtgtgg

SEQ ID NO: 841 - DNA, 15 bp, Artificial Sequence
  Description of Artificial Sequence: Synthetic oligonucleotide
agtgatctgcccgcc

SEQ ID NO: 842 - DNA, 15 bp, Artificial Sequence
  Description of Artificial Sequence: Synthetic oligonucleotide
gatggttgccgggtc

SEQ ID NO: 843 - DNA, 15 bp, Artificial Sequence
  Description of Artificial Sequence: Synthetic oligonucleotide
ttacccccaaccccg

SEQ ID NO: 844 - DNA, 15 bp, Artificial Sequence
  Description of Artificial Sequence: Synthetic oligonucleotide
cgccccgtccgggag

SEQ ID NO: 845 - DNA, 15 bp, Artificial Sequence
  Description of Artificial Sequence: Synthetic oligonucleotide
ccaccccgtctggga

SEQ ID NO: 846 - DNA, 15 bp, Artificial Sequence
  Description of Artificial Sequence: Synthetic oligonucleotide
tgggaggtggggggg

SEQ ID NO: 847 - DNA, 15 bp, Artificial Sequence
  Description of Artificial Sequence: Synthetic oligonucleotide
gtctccagctcctaa

SEQ ID NO: 848 - DNA, 15 bp, Artificial Sequence
  Description of Artificial Sequence: Synthetic oligonucleotide
aagattgcagcctct

SEQ ID NO: 849 - DNA, 15 bp, Artificial Sequence
  Description of Artificial Sequence: Synthetic oligonucleotide
gtgccgggattgcag

SEQ ID NO: 850 - DNA, 15 bp, Artificial Sequence
  Description of Artificial Sequence: Synthetic oligonucleotide
ataaccttaccccca

SEQ ID NO: 851 - DNA, 15 bp, Artificial Sequence
  Description of Artificial Sequence: Synthetic oligonucleotide
gttaagagtcatcac

SEQ ID NO: 852 - DNA, 15 bp, Artificial Sequence
  Description of Artificial Sequence: Synthetic oligonucleotide
gaagtgaggagcccc

SEQ ID NO: 853 - DNA, 15 bp, Artificial Sequence
  Description of Artificial Sequence: Synthetic oligonucleotide
gtgtctgtgtagaaa

SEQ ID NO: 854 - DNA, 15 bp, Artificial Sequence
  Description of Artificial Sequence: Synthetic oligonucleotide
ggggagcgcctctgc

SEQ ID NO: 855 - DNA, 15 bp, Artificial Sequence
  Description of Artificial Sequence: Synthetic oligonucleotide
ttgaccgggctggtc

SEQ ID NO: 856 - DNA, 15 bp, Artificial Sequence
  Description of Artificial Sequence: Synthetic oligonucleotide
ggtggggaaaaaatt

SEQ ID NO: 857 - DNA, 15 bp, Artificial Sequence
  Description of Artificial Sequence: Synthetic oligonucleotide
gtccgggaggtgggg

SEQ ID NO: 858 - DNA, 15 bp, Artificial Sequence
  Description of Artificial Sequence: Synthetic oligonucleotide
gggggcgcctctgcc

SEQ ID NO: 859 - DNA, 15 bp, Artificial Sequence
  Description of Artificial Sequence: Synthetic oligonucleotide
cgctacaacctccac

SEQ ID NO: 860 - DNA, 15 bp, Artificial Sequence
  Description of Artificial Sequence: Synthetic oligonucleotide
ggggaaaagatagag

SEQ ID NO: 861 - DNA, 15 bp, Artificial Sequence
  Description of Artificial Sequence: Synthetic oligonucleotide
aacacccaagaatga

SEQ ID NO: 862 - DNA, 15 bp, Artificial Sequence
  Description of Artificial Sequence: Synthetic oligonucleotide
ctgttaatctataac

SEQ ID NO: 863 - DNA, 15 bp, Artificial Sequence
  Description of Artificial Sequence: Synthetic oligonucleotide
tgtgttgaccgggct

SEQ ID NO: 864 - DNA, 15 bp, Artificial Sequence
  Description of Artificial Sequence: Synthetic oligonucleotide
accgcgagtgatctg

SEQ ID NO: 865 - DNA, 15 bp, Artificial Sequence
  Description of Artificial Sequence: Synthetic oligonucleotide
tgggggggtcagccc

SEQ ID NO: 866 - DNA, 15 bp, Artificial Sequence
  Description of Artificial Sequence: Synthetic oligonucleotide
tcccaaagtgctaag

SEQ ID NO: 867 - DNA, 15 bp, Artificial Sequence
  Description of Artificial Sequence: Synthetic oligonucleotide
ctcagggttaaatgg

SEQ ID NO: 868 - DNA, 15 bp, Artificial Sequence
  Description of Artificial Sequence: Synthetic oligonucleotide
tggccgggccggtct

SEQ ID NO: 869 - DNA, 15 bp, Artificial Sequence
  Description of Artificial Sequence: Synthetic oligonucleotide
tcctgcctcagcctg

SEQ ID NO: 870 - DNA, 15 bp, Artificial Sequence
  Description of Artificial Sequence: Synthetic oligonucleotide
gtctctgcctggccg

SEQ ID NO: 871 - DNA, 15 bp, Artificial Sequence
  Description of Artificial Sequence: Synthetic oligonucleotide
tcactgcaacctccc

SEQ ID NO: 872 - DNA, 15 bp, Artificial Sequence
  Description of Artificial Sequence: Synthetic oligonucleotide
ggagcccctctgcct

SEQ ID NO: 873 - DNA, 15 bp, Artificial Sequence
  Description of Artificial Sequence: Synthetic oligonucleotide
gtgatctgcccgcct

SEQ ID NO: 874 - DNA, 15 bp, Artificial Sequence
  Description of Artificial Sequence: Synthetic oligonucleotide
gcaagatgtgctttg

SEQ ID NO: 875 - DNA, 15 bp, Artificial Sequence
  Description of Artificial Sequence: Synthetic oligonucleotide
ggcgtgatctcggct

SEQ ID NO: 876 - DNA, 15 bp, Artificial Sequence
  Description of Artificial Sequence: Synthetic oligonucleotide
cctgattctcctgcc

SEQ ID NO: 877 - DNA, 15 bp, Artificial Sequence
  Description of Artificial Sequence: Synthetic oligonucleotide
gccaggatgacaatg

SEQ ID NO: 878 - DNA, 15 bp, Artificial Sequence
  Description of Artificial Sequence: Synthetic oligonucleotide
attgcaggcgcgcgc

SEQ ID NO: 879 - DNA, 15 bp, Artificial Sequence
  Description of Artificial Sequence: Synthetic oligonucleotide
tgcggagccgaagct

SEQ ID NO: 880 - DNA, 15 bp, Artificial Sequence
  Description of Artificial Sequence: Synthetic oligonucleotide
caacctccctgcctg

SEQ ID NO: 881 - DNA, 15 bp, Artificial Sequence
  Description of Artificial Sequence: Synthetic oligonucleotide
tgctgggattgcaga

SEQ ID NO: 882 - DNA, 15 bp, Artificial Sequence
  Description of Artificial Sequence: Synthetic oligonucleotide
caacctccctgcctc

SEQ ID NO: 883 - DNA, 15 bp, Artificial Sequence
  Description of Artificial Sequence: Synthetic oligonucleotide
acagctcattgagaa

SEQ ID NO: 884 - DNA, 15 bp, Artificial Sequence
  Description of Artificial Sequence: Synthetic oligonucleotide
cgccatcccatctag

SEQ ID NO: 885 - DNA, 15 bp, Artificial Sequence
  Description of Artificial Sequence: Synthetic oligonucleotide
ttcattttgttctgt

SEQ ID NO: 886 - DNA, 15 bp, Artificial Sequence
  Description of Artificial Sequence: Synthetic oligonucleotide
agcccctctgcctgg

SEQ ID NO: 887 - DNA, 15 bp, Artificial Sequence
  Description of Artificial Sequence: Synthetic oligonucleotide
tctccgagaaacacc

SEQ ID NO: 888 - DNA, 15 bp, Artificial Sequence
  Description of Artificial Sequence: Synthetic oligonucleotide
ggccgcagggtcctc

SEQ ID NO: 889 - DNA, 15 bp, Artificial Sequence
  Description of Artificial Sequence: Synthetic oligonucleotide
cgccccttctgggaa

SEQ ID NO: 890 - DNA, 15 bp, Artificial Sequence
  Description of Artificial Sequence: Synthetic oligonucleotide
ctcccctctttctac

SEQ ID NO: 891 - DNA, 15 bp, Artificial Sequence
  Description of Artificial Sequence: Synthetic oligonucleotide
caataaatactaaaa

SEQ ID NO: 892 - DNA, 15 bp, Artificial Sequence
  Description of Artificial Sequence: Synthetic oligonucleotide
atggcggttttgtgg

SEQ ID NO: 893 - DNA, 15 bp, Artificial Sequence
  Description of Artificial Sequence: Synthetic oligonucleotide
attgcaggcacgcgc

SEQ ID NO: 894 - DNA, 15 bp, Artificial Sequence
  Description of Artificial Sequence: Synthetic oligonucleotide
tcacgtgtttatctg

SEQ ID NO: 895 - DNA, 15 bp, Artificial Sequence
  Description of Artificial Sequence: Synthetic oligonucleotide
aagaggtagacatgg

SEQ ID NO: 896 - DNA, 15 bp, Artificial Sequence
  Description of Artificial Sequence: Synthetic oligonucleotide
ttaagtacccaggga

SEQ ID NO: 897 - DNA, 15 bp, Artificial Sequence
  Description of Artificial Sequence: Synthetic oligonucleotide
cgggctccagtgatt

SEQ ID NO: 898 - DNA, 15 bp, Artificial Sequence
  Description of Artificial Sequence: Synthetic oligonucleotide
gggatgtggggagcg

SEQ ID NO: 899 - DNA, 15 bp, Artificial Sequence
  Description of Artificial Sequence: Synthetic oligonucleotide
gggatgtggggagca

SEQ ID NO: 900 - DNA, 15 bp, Artificial Sequence
  Description of Artificial Sequence: Synthetic oligonucleotide
agacttcattttgtt

SEQ ID NO: 901 - DNA, 15 bp, Artificial Sequence
  Description of Artificial Sequence: Synthetic oligonucleotide
gtatttttttggtgg

SEQ ID NO: 902 - DNA, 15 bp, Artificial Sequence
  Description of Artificial Sequence: Synthetic oligonucleotide
atcgtctgggatgtg

SEQ ID NO: 903 - DNA, 15 bp, Artificial Sequence
  Description of Artificial Sequence: Synthetic oligonucleotide
gcgcctcttcccggc

SEQ ID NO: 904 - DNA, 15 bp, Artificial Sequence
  Description of Artificial Sequence: Synthetic oligonucleotide
acaaacactgcggaa

SEQ ID NO: 905 - DNA, 15 bp, Artificial Sequence
  Description of Artificial Sequence: Synthetic oligonucleotide
cccatcgtctgagat

SEQ ID NO: 906 - DNA, 15 bp, Artificial Sequence
  Description of Artificial Sequence: Synthetic oligonucleotide
gagacttcattttgt

SEQ ID NO: 907 - DNA, 15 bp, Artificial Sequence
  Description of Artificial Sequence: Synthetic oligonucleotide
ttaagagtcatcacc

SEQ ID NO: 908 - DNA, 15 bp, Artificial Sequence
  Description of Artificial Sequence: Synthetic oligonucleotide
gggcgcctctgcccg

SEQ ID NO: 909 - DNA, 15 bp, Artificial Sequence
  Description of Artificial Sequence: Synthetic oligonucleotide
ctcactgcaacctcc

SEQ ID NO: 910 - DNA, 15 bp, Artificial Sequence
  Description of Artificial Sequence: Synthetic oligonucleotide
atcgtctgagatgtg

SEQ ID NO: 911 - DNA, 15 bp, Artificial Sequence
  Description of Artificial Sequence: Synthetic oligonucleotide
ccggccgcccagtct

SEQ ID NO: 912 - DNA, 15 bp, Artificial Sequence
  Description of Artificial Sequence: Synthetic oligonucleotide
tgagatgtggggagc

SEQ ID NO: 913 - DNA, 15 bp, Artificial Sequence
  Description of Artificial Sequence: Synthetic oligonucleotide
gctgccatctcggct

SEQ ID NO: 914 - DNA, 15 bp, Artificial Sequence
  Description of Artificial Sequence: Synthetic oligonucleotide
agtggcgtgatctcg

SEQ ID NO: 915 - DNA, 15 bp, Artificial Sequence
  Description of Artificial Sequence: Synthetic oligonucleotide
cgcctgccttggcct

SEQ ID NO: 916 - DNA, 15 bp, Artificial Sequence
  Description of Artificial Sequence: Synthetic oligonucleotide
gctgtgtccactcag

SEQ ID NO: 917 - DNA, 15 bp, Artificial Sequence
  Description of Artificial Sequence: Synthetic oligonucleotide
ctcttcccggccgcc

SEQ ID NO: 918 - DNA, 15 bp, Artificial Sequence
  Description of Artificial Sequence: Synthetic oligonucleotide
gccgccacgcctgac

SEQ ID NO: 919 - DNA, 15 bp, Artificial Sequence
  Description of Artificial Sequence: Synthetic oligonucleotide
tttttttggtggaga

SEQ ID NO: 920 - DNA, 15 bp, Artificial Sequence
  Description of Artificial Sequence: Synthetic oligonucleotide
ctccctgtcccctct

SEQ ID NO: 921 - DNA, 15 bp, Artificial Sequence
  Description of Artificial Sequence: Synthetic oligonucleotide
ttacccccaaccctg

SEQ ID NO: 922 - DNA, 15 bp, Artificial Sequence
  Description of Artificial Sequence: Synthetic oligonucleotide
tgtggatagaagtag

SEQ ID NO: 923 - DNA, 15 bp, Artificial Sequence
  Description of Artificial Sequence: Synthetic oligonucleotide
ctacaaccacctccc

SEQ ID NO: 924 - DNA, 15 bp, Artificial Sequence
  Description of Artificial Sequence: Synthetic oligonucleotide
gtttatctgctgacc

SEQ ID NO: 925 - DNA, 15 bp, Artificial Sequence
  Description of Artificial Sequence: Synthetic oligonucleotide
ggggatgggccatga

SEQ ID NO: 926 - DNA, 15 bp, Artificial Sequence
  Description of Artificial Sequence: Synthetic oligonucleotide
gacttcattttgttc

SEQ ID NO: 927 - DNA, 15 bp, Artificial Sequence
  Description of Artificial Sequence: Synthetic oligonucleotide
tggcggttttgtgga

SEQ ID NO: 928 - DNA, 15 bp, Artificial Sequence
  Description of Artificial Sequence: Synthetic oligonucleotide
ccgcccagtctggga

SEQ ID NO: 929 - DNA, 15 bp, Artificial Sequence
  Description of Artificial Sequence: Synthetic oligonucleotide
ctcccagccgcctgc

SEQ ID NO: 930 - DNA, 15 bp, Artificial Sequence
  Description of Artificial Sequence: Synthetic oligonucleotide
gctcgctacaaccac

SEQ ID NO: 931 - DNA, 15 bp, Artificial Sequence
  Description of Artificial Sequence: Synthetic oligonucleotide
caccccgtctgggaa

SEQ ID NO: 932 - DNA, 15 bp, Artificial Sequence
  Description of Artificial Sequence: Synthetic oligonucleotide
gggagcgcctctgcc

SEQ ID NO: 933 - DNA, 15 bp, Artificial Sequence
  Description of Artificial Sequence: Synthetic oligonucleotide
gtggaatagaaaggc

SEQ ID NO: 934 - DNA, 15 bp, Artificial Sequence
  Description of Artificial Sequence: Synthetic oligonucleotide
tctcggctcactgca

SEQ ID NO: 935 - DNA, 15 bp, Artificial Sequence
  Description of Artificial Sequence: Synthetic oligonucleotide
gtggaatagaaaggg

SEQ ID NO: 936 - DNA, 15 bp, Artificial Sequence
  Description of Artificial Sequence: Synthetic oligonucleotide
gggaggaggtggggg

SEQ ID NO: 937 - DNA, 15 bp, Artificial Sequence
  Description of Artificial Sequence: Synthetic oligonucleotide
tttgtatttttggtg

SEQ ID NO: 938 - DNA, 15 bp, Artificial Sequence
  Description of Artificial Sequence: Synthetic oligonucleotide
ggtgcccaggctgga

SEQ ID NO: 939 - DNA, 15 bp, Artificial Sequence
  Description of Artificial Sequence: Synthetic oligonucleotide
tatttttttggtgga

SEQ ID NO: 940 - DNA, 15 bp, Artificial Sequence
  Description of Artificial Sequence: Synthetic oligonucleotide
ccgcctcggcctccc

SEQ ID NO: 941 - DNA, 15 bp, Artificial Sequence
  Description of Artificial Sequence: Synthetic oligonucleotide
tgccgggtctgtgtg

SEQ ID NO: 942 - DNA, 15 bp, Artificial Sequence
  Description of Artificial Sequence: Synthetic oligonucleotide
gaatagaaagggggg

SEQ ID NO: 943 - DNA, 15 bp, Artificial Sequence
  Description of Artificial Sequence: Synthetic oligonucleotide
tcaagtacccaggga

SEQ ID NO: 944 - DNA, 15 bp, Artificial Sequence
  Description of Artificial Sequence: Synthetic oligonucleotide
ggtagacatgggaga

SEQ ID NO: 945 - DNA, 15 bp, Artificial Sequence
  Description of Artificial Sequence: Synthetic oligonucleotide
acatgtgctgtgtcc

SEQ ID NO: 946 - DNA, 15 bp, Artificial Sequence
  Description of Artificial Sequence: Synthetic oligonucleotide
acatgtgctgtgtca

SEQ ID NO: 947 - DNA, 15 bp, Artificial Sequence
  Description of Artificial Sequence: Synthetic oligonucleotide
cggagtctggttcac

SEQ ID NO: 948 - DNA, 15 bp, Artificial Sequence
  Description of Artificial Sequence: Synthetic oligonucleotide
cgtatttttttggtg

SEQ ID NO: 949 - DNA, 15 bp, Artificial Sequence
  Description of Artificial Sequence: Synthetic oligonucleotide
acccccaaccccgtg

SEQ ID NO: 950 - DNA, 15 bp, Artificial Sequence
  Description of Artificial Sequence: Synthetic oligonucleotide
cctgcctgattctcc

SEQ ID NO: 951 - DNA, 15 bp, Artificial Sequence
  Description of Artificial Sequence: Synthetic oligonucleotide
cgtctgggaggtgtg

SEQ ID NO: 952 - DNA, 15 bp, Artificial Sequence
  Description of Artificial Sequence: Synthetic oligonucleotide
cgtctgggaggtgta

SEQ ID NO: 953 - DNA, 15 bp, Artificial Sequence
  Description of Artificial Sequence: Synthetic oligonucleotide
tctgcgagaaacacc

SEQ ID NO: 954 - DNA, 15 bp, Artificial Sequence
  Description of Artificial Sequence: Synthetic oligonucleotide
ttgagaacgggccat

SEQ ID NO: 955 - DNA, 15 bp, Artificial Sequence
  Description of Artificial Sequence: Synthetic oligonucleotide
ccccctctgcgagaa

SEQ ID NO: 956 - DNA, 15 bp, Artificial Sequence
  Description of Artificial Sequence: Synthetic oligonucleotide
cattggggatgggcc

SEQ ID NO: 957 - DNA, 15 bp, Artificial Sequence
  Description of Artificial Sequence: Synthetic oligonucleotide
gcgggaagggtgggg

SEQ ID NO: 958 - DNA, 15 bp, Artificial Sequence
  Description of Artificial Sequence: Synthetic oligonucleotide
gtacccagggacaca

SEQ ID NO: 959 - DNA, 15 bp, Artificial Sequence
  Description of Artificial Sequence: Synthetic oligonucleotide
gcgcctctgccccgc

SEQ ID NO: 960 - DNA, 15 bp, Artificial Sequence
  Description of Artificial Sequence: Synthetic oligonucleotide
tttcgccgtgttggc

SEQ ID NO: 961 - DNA, 15 bp, Artificial Sequence
  Description of Artificial Sequence: Synthetic oligonucleotide
tgtactgccgtgatc

SEQ ID NO: 962 - DNA, 15 bp, Artificial Sequence
  Description of Artificial Sequence: Synthetic oligonucleotide
acctccctgcctcgg

SEQ ID NO: 963 - DNA, 15 bp, Artificial Sequence
  Description of Artificial Sequence: Synthetic oligonucleotide
attttttggtggaga

SEQ ID NO: 964 - DNA, 15 bp, Artificial Sequence
  Description of Artificial Sequence: Synthetic oligonucleotide
ctatgaccctgccac

SEQ ID NO: 965 - DNA, 15 bp, Artificial Sequence
  Description of Artificial Sequence: Synthetic oligonucleotide
cttgtttatctgctg

SEQ ID NO: 966 - DNA, 15 bp, Artificial Sequence
  Description of Artificial Sequence: Synthetic oligonucleotide
ctatgaccctgccaa

SEQ ID NO: 967 - DNA, 15 bp, Artificial Sequence
  Description of Artificial Sequence: Synthetic oligonucleotide
taaaaaaaaaaaaaa

SEQ ID NO: 968 - DNA, 15 bp, Artificial Sequence
  Description of Artificial Sequence: Synthetic oligonucleotide
cgctacaacctacac

SEQ ID NO: 969 - DNA, 15 bp, Artificial Sequence
  Description of Artificial Sequence: Synthetic oligonucleotide
gtccactcagggtta

SEQ ID NO: 970 - DNA, 15 bp, Artificial Sequence
  Description of Artificial Sequence: Synthetic oligonucleotide
gcagggtcctctgcc

SEQ ID NO: 971 - DNA, 15 bp, Artificial Sequence
  Description of Artificial Sequence: Synthetic oligonucleotide
cccctctttccacgg

SEQ ID NO: 972 - DNA, 15 bp, Artificial Sequence
  Description of Artificial Sequence: Synthetic oligonucleotide
gtctgggaggtgagg

SEQ ID NO: 973 - DNA, 15 bp, Artificial Sequence
  Description of Artificial Sequence: Synthetic oligonucleotide
tggggatgggccatg

SEQ ID NO: 974 - DNA, 15 bp, Artificial Sequence
  Description of Artificial Sequence: Synthetic oligonucleotide
ggtgtacccagcgac

SEQ ID NO: 975 - DNA, 15 bp, Artificial Sequence
  Description of Artificial Sequence: Synthetic oligonucleotide
gctgaccttccctcc

SEQ ID NO: 976 - DNA, 15 bp, Artificial Sequence
  Description of Artificial Sequence: Synthetic oligonucleotide
ccgcgagtgatctgc

SEQ ID NO: 977 - DNA, 15 bp, Artificial Sequence
  Description of Artificial Sequence: Synthetic oligonucleotide
cggccgccccttctg

SEQ ID NO: 978 - DNA, 15 bp, Artificial Sequence
  Description of Artificial Sequence: Synthetic oligonucleotide
gattgagaaatcgga

SEQ ID NO: 979 - DNA, 15 bp, Artificial Sequence
  Description of Artificial Sequence: Synthetic oligonucleotide
agtgcctgggattgc

SEQ ID NO: 980 - DNA, 15 bp, Artificial Sequence
  Description of Artificial Sequence: Synthetic oligonucleotide
ctgagatgtggggag

SEQ ID NO: 981 - DNA, 15 bp, Artificial Sequence
  Description of Artificial Sequence: Synthetic oligonucleotide
agaagtagacatggg

SEQ ID NO: 982 - DNA, 15 bp, Artificial Sequence
  Description of Artificial Sequence: Synthetic oligonucleotide
cgcccatcgtctggg

SEQ ID NO: 983 - DNA, 15 bp, Artificial Sequence
  Description of Artificial Sequence: Synthetic oligonucleotide
tgcccggccgcccag

SEQ ID NO: 984 - DNA, 15 bp, Artificial Sequence
  Description of Artificial Sequence: Synthetic oligonucleotide
tcaataaaaaaaaaa

SEQ ID NO: 985 - DNA, 15 bp, Artificial Sequence
  Description of Artificial Sequence: Synthetic oligonucleotide
gtcgaatagaaaagg

SEQ ID NO: 986 - DNA, 15 bp, Artificial Sequence
  Description of Artificial Sequence: Synthetic oligonucleotide
ctccctctcccctct

SEQ ID NO: 987 - DNA, 15 bp, Artificial Sequence
  Description of Artificial Sequence: Synthetic oligonucleotide
tgcccggccgcccat

SEQ ID NO: 988 - DNA, 15 bp, Artificial Sequence
  Description of Artificial Sequence: Synthetic oligonucleotide
ttgagaacgggccag

SEQ ID NO: 989 - DNA, 15 bp, Artificial Sequence
  Description of Artificial Sequence: Synthetic oligonucleotide
agctggacggtactg

SEQ ID NO: 990 - DNA, 15 bp, Artificial Sequence
  Description of Artificial Sequence: Synthetic oligonucleotide
tgtatttttggtgga

SEQ ID NO: 991 - DNA, 15 bp, Artificial Sequence
  Description of Artificial Sequence: Synthetic oligonucleotide
aagaatgatcaataa

SEQ ID NO: 992 - DNA, 15 bp, Artificial Sequence
  Description of Artificial Sequence: Synthetic oligonucleotide
ctaatctcaagtaat

SEQ ID NO: 993 - DNA, 15 bp, Artificial Sequence
  Description of Artificial Sequence: Synthetic oligonucleotide
gatcctgttgatctg

SEQ ID NO: 994 - DNA, 15 bp, Artificial Sequence
  Description of Artificial Sequence: Synthetic oligonucleotide
tcggctcgctgcaac

SEQ ID NO: 995 - DNA, 15 bp, Artificial Sequence
  Description of Artificial Sequence: Synthetic oligonucleotide
cgccatctcggctca

SEQ ID NO: 996 - DNA, 15 bp, Artificial Sequence
  Description of Artificial Sequence: Synthetic oligonucleotide
aagaagtagacatag

SEQ ID NO: 997 - DNA, 15 bp, Artificial Sequence
  Description of Artificial Sequence: Synthetic oligonucleotide
ctccagctcctggcc

SEQ ID NO: 998 - DNA, 15 bp, Artificial Sequence
  Description of Artificial Sequence: Synthetic oligonucleotide
aaaagggggaaatgt

SEQ ID NO: 999 - DNA, 15 bp, Artificial Sequence
  Description of Artificial Sequence: Synthetic oligonucleotide
actgcggaaggccgc

SEQ ID NO: 1000 - DNA, 15 bp, Artificial Sequence
  Description of Artificial Sequence: Synthetic oligonucleotide
ccgtgatctcggctc

SEQ ID NO: 1001 - DNA, 15 bp, Artificial Sequence
  Description of Artificial Sequence: Synthetic oligonucleotide
tgtgtccactcaggg

SEQ ID NO: 1002 - DNA, 15 bp, Artificial Sequence
  Description of Artificial Sequence: Synthetic oligonucleotide
cgtgtttatctgctg

SEQ ID NO: 1003 - DNA, 15 bp, Artificial Sequence
  Description of Artificial Sequence: Synthetic oligonucleotide
atttttggtggagac

SEQ ID NO: 1004 - DNA, 15 bp, Artificial Sequence
  Description of Artificial Sequence: Synthetic oligonucleotide
agacctttgttcaca

SEQ ID NO: 1005 - DNA, 15 bp, Artificial Sequence
  Description of Artificial Sequence: Synthetic oligonucleotide
agacctttgttcacg

SEQ ID NO: 1006 - DNA, 15 bp, Artificial Sequence
  Description of Artificial Sequence: Synthetic oligonucleotide
ggattgcagacggag

SEQ ID NO: 1007 - DNA, 15 bp, Artificial Sequence
  Description of Artificial Sequence: Synthetic oligonucleotide
cccaaccccgtgctc

SEQ ID NO: 1008 - DNA, 15 bp, Artificial Sequence
  Description of Artificial Sequence: Synthetic oligonucleotide
agctcctggcctcga

SEQ ID NO: 1009 - DNA, 15 bp, Artificial Sequence
  Description of Artificial Sequence: Synthetic oligonucleotide
tagaaagaagtagac

SEQ ID NO: 1010 - DNA, 15 bp, Artificial Sequence
  Description of Artificial Sequence: Synthetic oligonucleotide
ctccagtgattctcc

SEQ ID NO: 1011 - DNA, 15 bp, Artificial Sequence
  Description of Artificial Sequence: Synthetic oligonucleotide
ctgcccggccaccgc

SEQ ID NO: 1012 - DNA, 15 bp, Artificial Sequence
  Description of Artificial Sequence: Synthetic oligonucleotide
atctcaagtaatcag

SEQ ID NO: 1013 - DNA, 15 bp, Artificial Sequence
  Description of Artificial Sequence: Synthetic oligonucleotide
gatggcggttttgtc

SEQ ID NO: 1014 - DNA, 15 bp, Artificial Sequence
  Description of Artificial Sequence: Synthetic oligonucleotide
gatggcggttttgtg

SEQ ID NO: 1015 - DNA, 15 bp, Artificial Sequence
  Description of Artificial Sequence: Synthetic oligonucleotide
aagtacccagggaca

SEQ ID NO: 1016 - DNA, 15 bp, Artificial Sequence
  Description of Artificial Sequence: Synthetic oligonucleotide
tcctggcctcgagtg

SEQ ID NO: 1017 - DNA, 15 bp, Artificial Sequence
  Description of Artificial Sequence: Synthetic oligonucleotide
cgttaagagtcatca

SEQ ID NO: 1018 - DNA, 15 bp, Artificial Sequence
  Description of Artificial Sequence: Synthetic oligonucleotide
acaatggcggctttg

SEQ ID NO: 1019 - DNA, 15 bp, Artificial Sequence
  Description of Artificial Sequence: Synthetic oligonucleotide
ggatgctgttgatct

SEQ ID NO: 1020 - DNA, 15 bp, Artificial Sequence
  Description of Artificial Sequence: Synthetic oligonucleotide
gtgtagaaagaggta

SEQ ID NO: 1021 - DNA, 15 bp, Artificial Sequence
  Description of Artificial Sequence: Synthetic oligonucleotide
aagattgagaaatcg

SEQ ID NO: 1022 - DNA, 15 bp, Artificial Sequence
  Description of Artificial Sequence: Synthetic oligonucleotide
gtgctgggattgcag

SEQ ID NO: 1023 - DNA, 15 bp, Artificial Sequence
  Description of Artificial Sequence: Synthetic oligonucleotide
ctccactattatcct

SEQ ID NO: 1024 - DNA, 15 bp, Artificial Sequence
  Description of Artificial Sequence: Synthetic oligonucleotide
gaccgcgagtgatct

SEQ ID NO: 1025 - DNA, 15 bp, Artificial Sequence
  Description of Artificial Sequence: Synthetic oligonucleotide
ggccatgatgacgat

SEQ ID NO: 1026 - DNA, 15 bp, Artificial Sequence
  Description of Artificial Sequence: Synthetic oligonucleotide
ccccgcccggccagc

SEQ ID NO: 1027 - DNA, 15 bp, Artificial Sequence
  Description of Artificial Sequence: Synthetic oligonucleotide
cggtctccagcccct

SEQ ID NO: 1028 - DNA, 15 bp, Artificial Sequence
  Description of Artificial Sequence: Synthetic oligonucleotide
cgtccgggaggaggt

SEQ ID NO: 1029 - DNA, 15 bp, Artificial Sequence
  Description of Artificial Sequence: Synthetic oligonucleotide
tacaacctacacctc

SEQ ID NO: 1030 - DNA, 15 bp, Artificial Sequence
  Description of Artificial Sequence: Synthetic oligonucleotide
gggagacttcatttt

SEQ ID NO: 1031 - DNA, 15 bp, Artificial Sequence
  Description of Artificial Sequence: Synthetic oligonucleotide
ccgggaggtgggggg

SEQ ID NO: 1032 - DNA, 15 bp, Artificial Sequence
  Description of Artificial Sequence: Synthetic oligonucleotide
ggttttgtggaatag

SEQ ID NO: 1033 - DNA, 15 bp, Artificial Sequence
  Description of Artificial Sequence: Synthetic oligonucleotide
gtttttttttggtgg

SEQ ID NO: 1034 - DNA, 15 bp, Artificial Sequence
  Description of Artificial Sequence: Synthetic oligonucleotide
cgggctggtctccag

SEQ ID NO: 1035 - DNA, 15 bp, Artificial Sequence
  Description of Artificial Sequence: Synthetic oligonucleotide
tccactattgtccta

SEQ ID NO: 1036 - DNA, 15 bp, Artificial Sequence
  Description of Artificial Sequence: Synthetic oligonucleotide
attgagaacgggcca

SEQ ID NO: 1037 - DNA, 15 bp, Artificial Sequence
  Description of Artificial Sequence: Synthetic oligonucleotide
cttctctccactatt

SEQ ID NO: 1038 - DNA, 15 bp, Artificial Sequence
  Description of Artificial Sequence: Synthetic oligonucleotide
gtgatccgccagcct

SEQ ID NO: 1039 - DNA, 15 bp, Artificial Sequence
  Description of Artificial Sequence: Synthetic oligonucleotide
gctggacggtactgc

SEQ ID NO: 1040 - DNA, 15 bp, Artificial Sequence
  Description of Artificial Sequence: Synthetic oligonucleotide
cccgtccgggaggag

SEQ ID NO: 1041 - DNA, 15 bp, Artificial Sequence
  Description of Artificial Sequence: Synthetic oligonucleotide
tctgggatgtgggga

SEQ ID NO: 1042 - DNA, 15 bp, Artificial Sequence
  Description of Artificial Sequence: Synthetic oligonucleotide
agagacctttgttca

SEQ ID NO: 1043 - DNA, 15 bp, Artificial Sequence
  Description of Artificial Sequence: Synthetic oligonucleotide
ccctctgcccggccg

SEQ ID NO: 1044 - DNA, 15 bp, Artificial Sequence
  Description of Artificial Sequence: Synthetic oligonucleotide
gacctttgttcactt

SEQ ID NO: 1045 - DNA, 15 bp, Artificial Sequence
  Description of Artificial Sequence: Synthetic oligonucleotide
ccctctgcccggcca

SEQ ID NO: 1046 - DNA, 15 bp, Artificial Sequence
  Description of Artificial Sequence: Synthetic oligonucleotide
tgccccgccgccccg

SEQ ID NO: 1047 - DNA, 15 bp, Artificial Sequence
  Description of Artificial Sequence: Synthetic oligonucleotide
ccggccgccccgtct

SEQ ID NO: 1048 - DNA, 15 bp, Artificial Sequence
  Description of Artificial Sequence: Synthetic oligonucleotide
gattgttactgtgtc

SEQ ID NO: 1049 - DNA, 15 bp, Artificial Sequence
  Description of Artificial Sequence: Synthetic oligonucleotide
tgggatgtggggagc

SEQ ID NO: 1050 - DNA, 15 bp, Artificial Sequence
  Description of Artificial Sequence: Synthetic oligonucleotide
acctccacctcccag

SEQ ID NO: 1051 - DNA, 15 bp, Artificial Sequence
  Description of Artificial Sequence: Synthetic oligonucleotide
tggttttcgtttttt

SEQ ID NO: 1052 - DNA, 15 bp, Artificial Sequence
  Description of Artificial Sequence: Synthetic oligonucleotide
ccggccaccgccccg

SEQ ID NO: 1053 - DNA, 15 bp, Artificial Sequence
  Description of Artificial Sequence: Synthetic oligonucleotide
aatgatcaataaaaa

SEQ ID NO: 1054 - DNA, 15 bp, Artificial Sequence
  Description of Artificial Sequence: Synthetic oligonucleotide
accccgtgctctctg

SEQ ID NO: 1055 - DNA, 15 bp, Artificial Sequence
  Description of Artificial Sequence: Synthetic oligonucleotide
gagtctcgttcactc

SEQ ID NO: 1056 - DNA, 15 bp, Artificial Sequence
  Description of Artificial Sequence: Synthetic oligonucleotide
cacgtgtttatctgc

SEQ ID NO: 1057 - DNA, 15 bp, Artificial Sequence
  Description of Artificial Sequence: Synthetic oligonucleotide
caggcacgcgccgcc

SEQ ID NO: 1058 - DNA, 15 bp, Artificial Sequence
  Description of Artificial Sequence: Synthetic oligonucleotide
tagacatgggagact

SEQ ID NO: 1059 - DNA, 15 bp, Artificial Sequence
  Description of Artificial Sequence: Synthetic oligonucleotide
ttaatctataacctt

SEQ ID NO: 1060 - DNA, 15 bp, Artificial Sequence
  Description of Artificial Sequence: Synthetic oligonucleotide
tctccactattatcc

SEQ ID NO: 1061 - DNA, 15 bp, Artificial Sequence
  Description of Artificial Sequence: Synthetic oligonucleotide
gtgtacccaacagct

SEQ ID NO: 1062 - DNA, 15 bp, Artificial Sequence
  Description of Artificial Sequence: Synthetic oligonucleotide
ccagctcctggcctc

SEQ ID NO: 1063 - DNA, 15 bp, Artificial Sequence
  Description of Artificial Sequence: Synthetic oligonucleotide
ccgtccgggaggtgg

SEQ ID NO: 1064 - DNA, 15 bp, Artificial Sequence
  Description of Artificial Sequence: Synthetic oligonucleotide
ccgtccgggaggtga

SEQ ID NO: 1065 - DNA, 15 bp, Artificial Sequence
  Description of Artificial Sequence: Synthetic oligonucleotide
ccatctcggctcact

SEQ ID NO: 1066 - DNA, 15 bp, Artificial Sequence
  Description of Artificial Sequence: Synthetic oligonucleotide
ccccccgcccggcca

SEQ ID NO: 1067 - DNA, 15 bp, Artificial Sequence
  Description of Artificial Sequence: Synthetic oligonucleotide
ttgtcctatgaccct

SEQ ID NO: 1068 - DNA, 15 bp, Artificial Sequence
  Description of Artificial Sequence: Synthetic oligonucleotide
cggtctccctctgat

SEQ ID NO: 1069 - DNA, 15 bp, Artificial Sequence
  Description of Artificial Sequence: Synthetic oligonucleotide
attctcctgcctcgg

SEQ ID NO: 1070 - DNA, 15 bp, Artificial Sequence
  Description of Artificial Sequence: Synthetic oligonucleotide
gatctgtgaccttac

SEQ ID NO: 1071 - DNA, 15 bp, Artificial Sequence
  Description of Artificial Sequence: Synthetic oligonucleotide
tgcccggccaccgcc

SEQ ID NO: 1072 - DNA, 15 bp, Artificial Sequence
  Description of Artificial Sequence: Synthetic oligonucleotide
actaagaaaaattct

SEQ ID NO: 1073 - DNA, 15 bp, Artificial Sequence
  Description of Artificial Sequence: Synthetic oligonucleotide
aagtgctaagattgc

SEQ ID NO: 1074 - DNA, 15 bp, Artificial Sequence
  Description of Artificial Sequence: Synthetic oligonucleotide
gagcgtctctgcccg

SEQ ID NO: 1075 - DNA, 15 bp, Artificial Sequence
  Description of Artificial Sequence: Synthetic oligonucleotide
gatctgtgaccttat

SEQ ID NO: 1076 - DNA, 15 bp, Artificial Sequence
  Description of Artificial Sequence: Synthetic oligonucleotide
tggttcactcagtgc

SEQ ID NO: 1077 - DNA, 15 bp, Artificial Sequence
  Description of Artificial Sequence: Synthetic oligonucleotide
gaccctgccaaatcc

SEQ ID NO: 1078 - DNA, 15 bp, Artificial Sequence
  Description of Artificial Sequence: Synthetic oligonucleotide
gattgcagcctctgc

SEQ ID NO: 1079 - DNA, 15 bp, Artificial Sequence
  Description of Artificial Sequence: Synthetic oligonucleotide
gacctctgcctagga

SEQ ID NO: 1080 - DNA, 15 bp, Artificial Sequence
  Description of Artificial Sequence: Synthetic oligonucleotide
catgatgacgatggc

SEQ ID NO: 1081 - DNA, 15 bp, Artificial Sequence
  Description of Artificial Sequence: Synthetic oligonucleotide
gggattgcagacgga

SEQ ID NO: 1082 - DNA, 15 bp, Artificial Sequence
  Description of Artificial Sequence: Synthetic oligonucleotide
cgggaggaggtgggg

SEQ ID NO: 1083 - DNA, 15 bp, Artificial Sequence
  Description of Artificial Sequence: Synthetic oligonucleotide
accccgtctgggagg

SEQ ID NO: 1084 - DNA, 15 bp, Artificial Sequence
  Description of Artificial Sequence: Synthetic oligonucleotide
ctccctctccctctc

SEQ ID NO: 1085 - DNA, 15 bp, Artificial Sequence
  Description of Artificial Sequence: Synthetic oligonucleotide
ctctccacggtctcc

SEQ ID NO: 1086 - DNA, 15 bp, Artificial Sequence
  Description of Artificial Sequence: Synthetic oligonucleotide
ggagtctcgctcact

SEQ ID NO: 1087 - DNA, 15 bp, Artificial Sequence
  Description of Artificial Sequence: Synthetic oligonucleotide
ggcctcgagtgatct

SEQ ID NO: 1088 - DNA, 15 bp, Artificial Sequence
  Description of Artificial Sequence: Synthetic oligonucleotide
cctctgcctggctgc

SEQ ID NO: 1089 - DNA, 15 bp, Artificial Sequence
  Description of Artificial Sequence: Synthetic oligonucleotide
tgcccggccgcccct

SEQ ID NO: 1090 - DNA, 15 bp, Artificial Sequence
  Description of Artificial Sequence: Synthetic oligonucleotide
atgccgagccgaagc

SEQ ID NO: 1091 - DNA, 15 bp, Artificial Sequence
  Description of Artificial Sequence: Synthetic oligonucleotide
aaatccccctctgtg

SEQ ID NO: 1092 - DNA, 15 bp, Artificial Sequence
  Description of Artificial Sequence: Synthetic oligonucleotide
cctttgttcacttgt

SEQ ID NO: 1093 - DNA, 15 bp, Artificial Sequence
  Description of Artificial Sequence: Synthetic oligonucleotide
ttgtttatctgctga

SEQ ID NO: 1094 - DNA, 15 bp, Artificial Sequence
  Description of Artificial Sequence: Synthetic oligonucleotide
actgtactgccgcca

SEQ ID NO: 1095 - DNA, 15 bp, Artificial Sequence
  Description of Artificial Sequence: Synthetic oligonucleotide
aaaaaaaaaaaaaaa

SEQ ID NO: 1096 - DNA, 15 bp, Artificial Sequence
  Description of Artificial Sequence: Synthetic oligonucleotide
gccgccatcccatct

SEQ ID NO: 1097 - DNA, 15 bp, Artificial Sequence
  Description of Artificial Sequence: Synthetic oligonucleotide
tgcccggccgccccg

SEQ ID NO: 1098 - DNA, 15 bp, Artificial Sequence
  Description of Artificial Sequence: Synthetic oligonucleotide
gacctttgttcacgt

SEQ ID NO: 1099 - DNA, 15 bp, Artificial Sequence
  Description of Artificial Sequence: Synthetic oligonucleotide
gccacatccccctct

SEQ ID NO: 1100 - DNA, 15 bp, Artificial Sequence
  Description of Artificial Sequence: Synthetic oligonucleotide
gttttcgtttttttt

SEQ ID NO: 1101 - DNA, 15 bp, Artificial Sequence
  Description of Artificial Sequence: Synthetic oligonucleotide
gtctctgcccggccg

SEQ ID NO: 1102 - DNA, 15 bp, Artificial Sequence
  Description of Artificial Sequence: Synthetic oligonucleotide
tggtctccagctcct

SEQ ID NO: 1103 - DNA, 15 bp, Artificial Sequence
  Description of Artificial Sequence: Synthetic oligonucleotide
cagacggagtctggt

SEQ ID NO: 1104 - DNA, 15 bp, Artificial Sequence
  Description of Artificial Sequence: Synthetic oligonucleotide
ccaaagagccggatt

SEQ ID NO: 1105 - DNA, 15 bp, Artificial Sequence
  Description of Artificial Sequence: Synthetic oligonucleotide
tggctgcccagtctg

SEQ ID NO: 1106 - DNA, 15 bp, Artificial Sequence
  Description of Artificial Sequence: Synthetic oligonucleotide
gagatcagattgtta

SEQ ID NO: 1107 - DNA, 15 bp, Artificial Sequence
  Description of Artificial Sequence: Synthetic oligonucleotide
gggaaatgtggggaa

SEQ ID NO: 1108 - DNA, 15 bp, Artificial Sequence
  Description of Artificial Sequence: Synthetic oligonucleotide
cctcccaaagtgcta

SEQ ID NO: 1109 - DNA, 15 bp, Artificial Sequence
  Description of Artificial Sequence: Synthetic oligonucleotide
ccatcgtctgagatg

SEQ ID NO: 1110 - DNA, 15 bp, Artificial Sequence
  Description of Artificial Sequence: Synthetic oligonucleotide
ggccgcccatcgtct

SEQ ID NO: 1111 - DNA, 15 bp, Artificial Sequence
  Description of Artificial Sequence: Synthetic oligonucleotide
ggagtgcagtggcgt

SEQ ID NO: 1112 - DNA, 15 bp, Artificial Sequence
  Description of Artificial Sequence: Synthetic oligonucleotide
ccctaaccgcgagtg

SEQ ID NO: 1113 - DNA, 15 bp, Artificial Sequence
  Description of Artificial Sequence: Synthetic oligonucleotide
ggttttgtcgaaaag

SEQ ID NO: 1114 - DNA, 15 bp, Artificial Sequence
  Description of Artificial Sequence: Synthetic oligonucleotide
taatctataacctta

SEQ ID NO: 1115 - DNA, 15 bp, Artificial Sequence
  Description of Artificial Sequence: Synthetic oligonucleotide
tacacctcccagccg

SEQ ID NO: 1116 - DNA, 15 bp, Artificial Sequence
  Description of Artificial Sequence: Synthetic oligonucleotide
ttgcagcctctgccc

SEQ ID NO: 1117 - DNA, 15 bp, Artificial Sequence
  Description of Artificial Sequence: Synthetic oligonucleotide
agattgagaaatcgg

SEQ ID NO: 1118 - DNA, 15 bp, Artificial Sequence
  Description of Artificial Sequence: Synthetic oligonucleotide
attgttactgtgtct

SEQ ID NO: 1119 - DNA, 15 bp, Artificial Sequence
  Description of Artificial Sequence: Synthetic oligonucleotide
tttgttcacttgttt

SEQ ID NO: 1120 - DNA, 15 bp, Artificial Sequence
  Description of Artificial Sequence: Synthetic oligonucleotide
ctcgctacaacctac

SEQ ID NO: 1121 - DNA, 15 bp, Artificial Sequence
  Description of Artificial Sequence: Synthetic oligonucleotide
actggttttcgtttt

SEQ ID NO: 1122 - DNA, 15 bp, Artificial Sequence
  Description of Artificial Sequence: Synthetic oligonucleotide
ctgcccggccaccac

SEQ ID NO: 1123 - DNA, 15 bp, Artificial Sequence
  Description of Artificial Sequence: Synthetic oligonucleotide
gctccagtgattctc

SEQ ID NO: 1124 - DNA, 15 bp, Artificial Sequence
  Description of Artificial Sequence: Synthetic oligonucleotide
ctaagaaaaattctt

SEQ ID NO: 1125 - DNA, 15 bp, Artificial Sequence
  Description of Artificial Sequence: Synthetic oligonucleotide
ccccctctccgagaa

SEQ ID NO: 1126 - DNA, 15 bp, Artificial Sequence
  Description of Artificial Sequence: Synthetic oligonucleotide
cctctctccacggtc

SEQ ID NO: 1127 - DNA, 15 bp, Artificial Sequence
  Description of Artificial Sequence: Synthetic oligonucleotide
aatagaaagggggga

SEQ ID NO: 1128 - DNA, 15 bp, Artificial Sequence
  Description of Artificial Sequence: Synthetic oligonucleotide
tctttccacggtctc

SEQ ID NO: 1129 - DNA, 15 bp, Artificial Sequence
  Description of Artificial Sequence: Synthetic oligonucleotide
cgtgtctgtgtagaa

SEQ ID NO: 1130 - DNA, 15 bp, Artificial Sequence
  Description of Artificial Sequence: Synthetic oligonucleotide
tccagctcctaaccg

SEQ ID NO: 1131 - DNA, 15 bp, Artificial Sequence
  Description of Artificial Sequence: Synthetic oligonucleotide
tcctaaccgcgagtg

SEQ ID NO: 1132 - DNA, 15 bp, Artificial Sequence
  Description of Artificial Sequence: Synthetic oligonucleotide
tgaccttccctccac

SEQ ID NO: 1133 - DNA, 15 bp, Artificial Sequence
  Description of Artificial Sequence: Synthetic oligonucleotide
cagggacctctgcct

SEQ ID NO: 1134 - DNA, 15 bp, Artificial Sequence
  Description of Artificial Sequence: Synthetic oligonucleotide
tgttaaacagatgct

SEQ ID NO: 1135 - DNA, 15 bp, Artificial Sequence
  Description of Artificial Sequence: Synthetic oligonucleotide
ccgtctgggaggtga

SEQ ID NO: 1136 - DNA, 15 bp, Artificial Sequence
  Description of Artificial Sequence: Synthetic oligonucleotide
aatgatcaataaata

SEQ ID NO: 1137 - DNA, 15 bp, Artificial Sequence
  Description of Artificial Sequence: Synthetic oligonucleotide
cgccagcctcggcct

SEQ ID NO: 1138 - DNA, 15 bp, Artificial Sequence
  Description of Artificial Sequence: Synthetic oligonucleotide
tggtgcccaggctgg

SEQ ID NO: 1139 - DNA, 15 bp, Artificial Sequence
  Description of Artificial Sequence: Synthetic oligonucleotide
tgcctggccgcccat

SEQ ID NO: 1140 - DNA, 15 bp, Artificial Sequence
  Description of Artificial Sequence: Synthetic oligonucleotide
aggaaaaccagagac

SEQ ID NO: 1141 - DNA, 15 bp, Artificial Sequence
  Description of Artificial Sequence: Synthetic oligonucleotide
ctcggctcgctgcaa

SEQ ID NO: 1142 - DNA, 15 bp, Artificial Sequence
  Description of Artificial Sequence: Synthetic oligonucleotide
gaggtgtgcccaaca

SEQ ID NO: 1143 - DNA, 15 bp, Artificial Sequence
  Description of Artificial Sequence: Synthetic oligonucleotide
acgcgccgccacgcc

SEQ ID NO: 1144 - DNA, 15 bp, Artificial Sequence
  Description of Artificial Sequence: Synthetic oligonucleotide
ccgtctgggaggtgt

SEQ ID NO: 1145 - DNA, 15 bp, Artificial Sequence
  Description of Artificial Sequence: Synthetic oligonucleotide
ctcctggcctcgagt

SEQ ID NO: 1146 - DNA, 15 bp, Artificial Sequence
  Description of Artificial Sequence: Synthetic oligonucleotide
gagtctggttcactc

SEQ ID NO: 1147 - DNA, 15 bp, Artificial Sequence
  Description of Artificial Sequence: Synthetic oligonucleotide
cgtctctgcccggcc

SEQ ID NO: 1148 - DNA, 15 bp, Artificial Sequence
  Description of Artificial Sequence: Synthetic oligonucleotide
ttctcctgcctcagc

SEQ ID NO: 1149 - DNA, 15 bp, Artificial Sequence
  Description of Artificial Sequence: Synthetic oligonucleotide
ccctgtgctctctga

SEQ ID NO: 1150 - DNA, 15 bp, Artificial Sequence
  Description of Artificial Sequence: Synthetic oligonucleotide
cctcccgaggtgctg

SEQ ID NO: 1151 - DNA, 15 bp, Artificial Sequence
  Description of Artificial Sequence: Synthetic oligonucleotide
gtcccatgaccctgc

SEQ ID NO: 1152 - DNA, 15 bp, Artificial Sequence
  Description of Artificial Sequence: Synthetic oligonucleotide
agaaagagagatcag

SEQ ID NO: 1153 - DNA, 15 bp, Artificial Sequence
  Description of Artificial Sequence: Synthetic oligonucleotide
cgagccgaggctgga

SEQ ID NO: 1154 - DNA, 15 bp, Artificial Sequence
  Description of Artificial Sequence: Synthetic oligonucleotide
atagaaaggcgggaa

SEQ ID NO: 1155 - DNA, 15 bp, Artificial Sequence
  Description of Artificial Sequence: Synthetic oligonucleotide
agccgccccgtccgg

SEQ ID NO: 1156 - DNA, 15 bp, Artificial Sequence
  Description of Artificial Sequence: Synthetic oligonucleotide
cggattgcagcctct

SEQ ID NO: 1157 - DNA, 15 bp, Artificial Sequence
  Description of Artificial Sequence: Synthetic oligonucleotide
ttatccccaaccctg

SEQ ID NO: 1158 - DNA, 15 bp, Artificial Sequence
  Description of Artificial Sequence: Synthetic oligonucleotide
aatctataaccttac

SEQ ID NO: 1159 - DNA, 15 bp, Artificial Sequence
  Description of Artificial Sequence: Synthetic oligonucleotide
ctacaacctccacct

SEQ ID NO: 1160 - DNA, 15 bp, Artificial Sequence
  Description of Artificial Sequence: Synthetic oligonucleotide
gtggggagcacctct

SEQ ID NO: 1161 - DNA, 15 bp, Artificial Sequence
  Description of Artificial Sequence: Synthetic oligonucleotide
aaatccccctctgcg

SEQ ID NO: 1162 - DNA, 15 bp, Artificial Sequence
  Description of Artificial Sequence: Synthetic oligonucleotide
tgcaggcgcgcgccg

SEQ ID NO: 1163 - DNA, 15 bp, Artificial Sequence
  Description of Artificial Sequence: Synthetic oligonucleotide
gatctcggctcgctg

SEQ ID NO: 1164 - DNA, 15 bp, Artificial Sequence
  Description of Artificial Sequence: Synthetic oligonucleotide
cagcctgccgagtgc

SEQ ID NO: 1165 - DNA, 15 bp, Artificial Sequence
  Description of Artificial Sequence: Synthetic oligonucleotide
agattgcagcctctg

SEQ ID NO: 1166 - DNA, 15 bp, Artificial Sequence
  Description of Artificial Sequence: Synthetic oligonucleotide
tgcccagcggctcat

SEQ ID NO: 1167 - DNA, 15 bp, Artificial Sequence
  Description of Artificial Sequence: Synthetic oligonucleotide
aggtgaggggcgcct

SEQ ID NO: 1168 - DNA, 15 bp, Artificial Sequence
  Description of Artificial Sequence: Synthetic oligonucleotide
gatctcggctcgcta

SEQ ID NO: 1169 - DNA, 15 bp, Artificial Sequence
  Description of Artificial Sequence: Synthetic oligonucleotide
tgcccgcctcggcct

SEQ ID NO: 1170 - DNA, 15 bp, Artificial Sequence
  Description of Artificial Sequence: Synthetic oligonucleotide
gggcggtgcaagatg

SEQ ID NO: 1171 - DNA, 15 bp, Artificial Sequence
  Description of Artificial Sequence: Synthetic oligonucleotide
cccgtctaggaagtg

SEQ ID NO: 1172 - DNA, 15 bp, Artificial Sequence
  Description of Artificial Sequence: Synthetic oligonucleotide
agacataggagactc

SEQ ID NO: 1173 - DNA, 15 bp, Artificial Sequence
  Description of Artificial Sequence: Synthetic oligonucleotide
taatcttaagtaccc

SEQ ID NO: 1174 - DNA, 15 bp, Artificial Sequence
  Description of Artificial Sequence: Synthetic oligonucleotide
acctccctgcctgat

SEQ ID NO: 1175 - DNA, 15 bp, Artificial Sequence
  Description of Artificial Sequence: Synthetic oligonucleotide
tccgccagcctcggc

SEQ ID NO: 1176 - DNA, 15 bp, Artificial Sequence
  Description of Artificial Sequence: Synthetic oligonucleotide
tcccgtctgggaagt

SEQ ID NO: 1177 - DNA, 15 bp, Artificial Sequence
  Description of Artificial Sequence: Synthetic oligonucleotide
gaggtgccgggattg

SEQ ID NO: 1178 - DNA, 15 bp, Artificial Sequence
  Description of Artificial Sequence: Synthetic oligonucleotide
cctctgcgagaaaca

SEQ ID NO: 1179 - DNA, 15 bp, Artificial Sequence
  Description of Artificial Sequence: Synthetic oligonucleotide
tggttttcgtatttt

SEQ ID NO: 1180 - DNA, 15 bp, Artificial Sequence
  Description of Artificial Sequence: Synthetic oligonucleotide
cccctaaccgcgagt

SEQ ID NO: 1181 - DNA, 15 bp, Artificial Sequence
  Description of Artificial Sequence: Synthetic oligonucleotide
agatgtgctttgtta

SEQ ID NO: 1182 - DNA, 15 bp, Artificial Sequence
  Description of Artificial Sequence: Synthetic oligonucleotide
aaaaaattgagaaat

SEQ ID NO: 1183 - DNA, 15 bp, Artificial Sequence
  Description of Artificial Sequence: Synthetic oligonucleotide
atgcggagccgaagc

SEQ ID NO: 1184 - DNA, 15 bp, Artificial Sequence
  Description of Artificial Sequence: Synthetic oligonucleotide
gctgtgttgaccggg

SEQ ID NO: 1185 - DNA, 15 bp, Artificial Sequence
  Description of Artificial Sequence: Synthetic oligonucleotide
tttcgctgtgttgac

SEQ ID NO: 1186 - DNA, 15 bp, Artificial Sequence
  Description of Artificial Sequence: Synthetic oligonucleotide
gctgggattgcagac

SEQ ID NO: 1187 - DNA, 15 bp, Artificial Sequence
  Description of Artificial Sequence: Synthetic oligonucleotide
gatgccgagccgagg

SEQ ID NO: 1188 - DNA, 15 bp, Artificial Sequence
  Description of Artificial Sequence: Synthetic oligonucleotide
cgtgatctcggctcg

SEQ ID NO: 1189 - DNA, 15 bp, Artificial Sequence
  Description of Artificial Sequence: Synthetic oligonucleotide
tgtgaccttatcccc

SEQ ID NO: 1190 - DNA, 15 bp, Artificial Sequence
  Description of Artificial Sequence: Synthetic oligonucleotide
aatgttgcccaggct

SEQ ID NO: 1191 - DNA, 15 bp, Artificial Sequence
  Description of Artificial Sequence: Synthetic oligonucleotide
ctttccacggtctcc

SEQ ID NO: 1192 - DNA, 15 bp, Artificial Sequence
  Description of Artificial Sequence: Synthetic oligonucleotide
agtgcctgcgattgc

SEQ ID NO: 1193 - DNA, 15 bp, Artificial Sequence
  Description of Artificial Sequence: Synthetic oligonucleotide
ccggtctccagcccc

SEQ ID NO: 1194 - DNA, 15 bp, Artificial Sequence
  Description of Artificial Sequence: Synthetic oligonucleotide
agaacgggccaggat

SEQ ID NO: 1195 - DNA, 15 bp, Artificial Sequence
  Description of Artificial Sequence: Synthetic oligonucleotide
aggctggagtgcagt

SEQ ID NO: 1196 - DNA, 15 bp, Artificial Sequence
  Description of Artificial Sequence: Synthetic oligonucleotide
gccgagccgaagctg

SEQ ID NO: 1197 - DNA, 15 bp, Artificial Sequence
  Description of Artificial Sequence: Synthetic oligonucleotide
gtgtagaaagaagta

SEQ ID NO: 1198 - DNA, 15 bp, Artificial Sequence
  Description of Artificial Sequence: Synthetic oligonucleotide
tttcattttgttctg

SEQ ID NO: 1199 - DNA, 15 bp, Artificial Sequence
  Description of Artificial Sequence: Synthetic oligonucleotide
agagccggattgcag

SEQ ID NO: 1200 - DNA, 15 bp, Artificial Sequence
  Description of Artificial Sequence: Synthetic oligonucleotide
gggatgggccatgat

SEQ ID NO: 1201 - DNA, 15 bp, Artificial Sequence
  Description of Artificial Sequence: Synthetic oligonucleotide
gcggctttgtggaat

SEQ ID NO: 1202 - DNA, 15 bp, Artificial Sequence
  Description of Artificial Sequence: Synthetic oligonucleotide
tgaggagcccctctg

SEQ ID NO: 1203 - DNA, 15 bp, Artificial Sequence
  Description of Artificial Sequence: Synthetic oligonucleotide
aaatcggattgttgc

SEQ ID NO: 1204 - DNA, 15 bp, Artificial Sequence
  Description of Artificial Sequence: Synthetic oligonucleotide
ttatcaataaaaaaa

SEQ ID NO: 1205 - DNA, 15 bp, Artificial Sequence
  Description of Artificial Sequence: Synthetic oligonucleotide
acacccaagaattat

SEQ ID NO: 1206 - DNA, 15 bp, Artificial Sequence
  Description of Artificial Sequence: Synthetic oligonucleotide
cacctcccagccgcc

SEQ ID NO: 1207 - DNA, 15 bp, Artificial Sequence
  Description of Artificial Sequence: Synthetic oligonucleotide
ggcctcccaaagtgc

SEQ ID NO: 1208 - DNA, 15 bp, Artificial Sequence
  Description of Artificial Sequence: Synthetic oligonucleotide
tgtgcccaacagctc

SEQ ID NO: 1209 - DNA, 15 bp, Artificial Sequence
  Description of Artificial Sequence: Synthetic oligonucleotide
gcccggccgccccgt

SEQ ID NO: 1210 - DNA, 15 bp, Artificial Sequence
  Description of Artificial Sequence: Synthetic oligonucleotide
ctcaagtacccaggg

SEQ ID NO: 1211 - DNA, 15 bp, Artificial Sequence
  Description of Artificial Sequence: Synthetic oligonucleotide
cagggtcctctgcct

SEQ ID NO: 1212 - DNA, 15 bp, Artificial Sequence
  Description of Artificial Sequence: Synthetic oligonucleotide
catcccatctaggaa

SEQ ID NO: 1213 - DNA, 15 bp, Artificial Sequence
  Description of Artificial Sequence: Synthetic oligonucleotide
ttggcctcccaaagt

SEQ ID NO: 1214 - DNA, 15 bp, Artificial Sequence
  Description of Artificial Sequence: Synthetic oligonucleotide
tgatgacgatggcgg

SEQ ID NO: 1215 - DNA, 15 bp, Artificial Sequence
  Description of Artificial Sequence: Synthetic oligonucleotide
ggtgccgggattgca

SEQ ID NO: 1216 - DNA, 15 bp, Artificial Sequence
  Description of Artificial Sequence: Synthetic oligonucleotide
atgctgttgatctgt

SEQ ID NO: 1217 - DNA, 15 bp, Artificial Sequence
  Description of Artificial Sequence: Synthetic oligonucleotide
caatggtgcccaggc

SEQ ID NO: 1218 - DNA, 15 bp, Artificial Sequence
  Description of Artificial Sequence: Synthetic oligonucleotide
gggattgcaggcgcg

SEQ ID NO: 1219 - DNA, 15 bp, Artificial Sequence
  Description of Artificial Sequence: Synthetic oligonucleotide
tccagcccctaaccg

SEQ ID NO: 1220 - DNA, 15 bp, Artificial Sequence
  Description of Artificial Sequence: Synthetic oligonucleotide
ttggcctcccaaaga

SEQ ID NO: 1221 - DNA, 15 bp, Artificial Sequence
  Description of Artificial Sequence: Synthetic oligonucleotide
cggtgcaagatgtgc

SEQ ID NO: 1222 - DNA, 15 bp, Artificial Sequence
  Description of Artificial Sequence: Synthetic oligonucleotide
gctgtgtcaactcag

SEQ ID NO: 1223 - DNA, 15 bp, Artificial Sequence
  Description of Artificial Sequence: Synthetic oligonucleotide
ccgcccggccgccat

SEQ ID NO: 1224 - DNA, 15 bp, Artificial Sequence
  Description of Artificial Sequence: Synthetic oligonucleotide
cctctttccacggtc

SEQ ID NO: 1225 - DNA, 15 bp, Artificial Sequence
  Description of Artificial Sequence: Synthetic oligonucleotide
gttttgtggaataga

SEQ ID NO: 1226 - DNA, 15 bp, Artificial Sequence
  Description of Artificial Sequence: Synthetic oligonucleotide
aaatcggatggttgc

SEQ ID NO: 1227 - DNA, 15 bp, Artificial Sequence
  Description of Artificial Sequence: Synthetic oligonucleotide
gctcgctgcaacctc

SEQ ID NO: 1228 - DNA, 15 bp, Artificial Sequence
  Description of Artificial Sequence: Synthetic oligonucleotide
gctcgttaagagtca

SEQ ID NO: 1229 - DNA, 15 bp, Artificial Sequence
  Description of Artificial Sequence: Synthetic oligonucleotide
acccaagaattatca

SEQ ID NO: 1230 - DNA, 15 bp, Artificial Sequence
  Description of Artificial Sequence: Synthetic oligonucleotide
aggctggactgtact

SEQ ID NO: 1231 - DNA, 15 bp, Artificial Sequence
  Description of Artificial Sequence: Synthetic oligonucleotide
ggccaccgccccgtc

SEQ ID NO: 1232 - DNA, 15 bp, Artificial Sequence
  Description of Artificial Sequence: Synthetic oligonucleotide
cggatggttgccgtg

SEQ ID NO: 1233 - DNA, 15 bp, Artificial Sequence
  Description of Artificial Sequence: Synthetic oligonucleotide
tacccagggacacaa

SEQ ID NO: 1234 - DNA, 15 bp, Artificial Sequence
  Description of Artificial Sequence: Synthetic oligonucleotide
gaccttccctccact

SEQ ID NO: 1235 - DNA, 15 bp, Artificial Sequence
  Description of Artificial Sequence: Synthetic oligonucleotide
aaccctgtgctctct

SEQ ID NO: 1236 - DNA, 15 bp, Artificial Sequence
  Description of Artificial Sequence: Synthetic oligonucleotide
ctgccacatccccct

SEQ ID NO: 1237 - DNA, 15 bp, Artificial Sequence
  Description of Artificial Sequence: Synthetic oligonucleotide
gttgcccaggctgga

SEQ ID NO: 1238 - DNA, 15 bp, Artificial Sequence
  Description of Artificial Sequence: Synthetic oligonucleotide
gttctgtactaagaa

SEQ ID NO: 1239 - DNA, 15 bp, Artificial Sequence
  Description of Artificial Sequence: Synthetic oligonucleotide
ttgtcgaaaagaaaa

SEQ ID NO: 1240 - DNA, 15 bp, Artificial Sequence
  Description of Artificial Sequence: Synthetic oligonucleotide
tccccctctgcgaga

SEQ ID NO: 1241 - DNA, 15 bp, Artificial Sequence
  Description of Artificial Sequence: Synthetic oligonucleotide
cctgcctcagcctgc

SEQ ID NO: 1242 - DNA, 15 bp, Artificial Sequence
  Description of Artificial Sequence: Synthetic oligonucleotide
ttactgtgtctgtgt

SEQ ID NO: 1243 - DNA, 15 bp, Artificial Sequence
  Description of Artificial Sequence: Synthetic oligonucleotide
tgggaggtgaggggc

SEQ ID NO: 1244 - DNA, 15 bp, Artificial Sequence
  Description of Artificial Sequence: Synthetic oligonucleotide
cttctgccttgggat

SEQ ID NO: 1245 - DNA, 15 bp, Artificial Sequence
  Description of Artificial Sequence: Synthetic oligonucleotide
gaccttacccccaac

SEQ ID NO: 1246 - DNA, 15 bp, Artificial Sequence
  Description of Artificial Sequence: Synthetic oligonucleotide
ttctcctgcctcggc

SEQ ID NO: 1247 - DNA, 15 bp, Artificial Sequence
  Description of Artificial Sequence: Synthetic oligonucleotide
ccgcagggtcctctg

SEQ ID NO: 1248 - DNA, 15 bp, Artificial Sequence
  Description of Artificial Sequence: Synthetic oligonucleotide
aggtgccgggattgc

SEQ ID NO: 1249 - DNA, 15 bp, Artificial Sequence
  Description of Artificial Sequence: Synthetic oligonucleotide
cccggccaccacccc

SEQ ID NO: 1250 - DNA, 15 bp, Artificial Sequence
  Description of Artificial Sequence: Synthetic oligonucleotide
catgggagacttcat

SEQ ID NO: 1251 - DNA, 15 bp, Artificial Sequence
  Description of Artificial Sequence: Synthetic oligonucleotide
tgcctggctgcccag

SEQ ID NO: 1252 - DNA, 15 bp, Artificial Sequence
  Description of Artificial Sequence: Synthetic oligonucleotide
tattatcctatgacc

SEQ ID NO: 1253 - DNA, 15 bp, Artificial Sequence
  Description of Artificial Sequence: Synthetic oligonucleotide
cctgcctcgggctcc

SEQ ID NO: 1254 - DNA, 15 bp, Artificial Sequence
  Description of Artificial Sequence: Synthetic oligonucleotide
gggggaaaggtgggg

SEQ ID NO: 1255 - DNA, 15 bp, Artificial Sequence
  Description of Artificial Sequence: Synthetic oligonucleotide
ctccctgcctcgggc

SEQ ID NO: 1256 - DNA, 15 bp, Artificial Sequence
  Description of Artificial Sequence: Synthetic oligonucleotide
cagcccctaaccgcg

SEQ ID NO: 1257 - DNA, 15 bp, Artificial Sequence
  Description of Artificial Sequence: Synthetic oligonucleotide
acctacacctcccag

SEQ ID NO: 1258 - DNA, 15 bp, Artificial Sequence
  Description of Artificial Sequence: Synthetic oligonucleotide
aaggtggggaaaaga

SEQ ID NO: 1259 - DNA, 15 bp, Artificial Sequence
  Description of Artificial Sequence: Synthetic oligonucleotide
tcccctctctccacg

SEQ ID NO: 1260 - DNA, 15 bp, Artificial Sequence
  Description of Artificial Sequence: Synthetic oligonucleotide
gatgtggggagcgcc

SEQ ID NO: 1261 - DNA, 15 bp, Artificial Sequence
  Description of Artificial Sequence: Synthetic oligonucleotide
gaccctgccacatcc

SEQ ID NO: 1262 - DNA, 15 bp, Artificial Sequence
  Description of Artificial Sequence: Synthetic oligonucleotide
agcggctcattgggg

SEQ ID NO: 1263 - DNA, 15 bp, Artificial Sequence
  Description of Artificial Sequence: Synthetic oligonucleotide
atcaataaaaaaaat

SEQ ID NO: 1264 - DNA, 15 bp, Artificial Sequence
  Description of Artificial Sequence: Synthetic oligonucleotide
gccttggcctcccaa

SEQ ID NO: 1265 - DNA, 15 bp, Artificial Sequence
  Description of Artificial Sequence: Synthetic oligonucleotide
ttaagggcggtgcaa

SEQ ID NO: 1266 - DNA, 15 bp, Artificial Sequence
  Description of Artificial Sequence: Synthetic oligonucleotide
atggcggctttgtgg

SEQ ID NO: 1267 - DNA, 15 bp, Artificial Sequence
  Description of Artificial Sequence: Synthetic oligonucleotide
aagggcggtgcaaga

SEQ ID NO: 1268 - DNA, 15 bp, Artificial Sequence
  Description of Artificial Sequence: Synthetic oligonucleotide
gtgccgagattgcag

SEQ ID NO: 1269 - DNA, 15 bp, Artificial Sequence
  Description of Artificial Sequence: Synthetic oligonucleotide
gcctgccttggcctc

SEQ ID NO: 1270 - DNA, 15 bp, Artificial Sequence
  Description of Artificial Sequence: Synthetic oligonucleotide
gccgccccgtccggg

SEQ ID NO: 1271 - DNA, 15 bp, Artificial Sequence
  Description of Artificial Sequence: Synthetic oligonucleotide
ccaaatccccctctc

SEQ ID NO: 1272 - DNA, 15 bp, Artificial Sequence
  Description of Artificial Sequence: Synthetic oligonucleotide
acctttgttcacatg

SEQ ID NO: 1273 - DNA, 15 bp, Artificial Sequence
  Description of Artificial Sequence: Synthetic oligonucleotide
ccaaatccccctctg

SEQ ID NO: 1274 - DNA, 15 bp, Artificial Sequence
  Description of Artificial Sequence: Synthetic oligonucleotide
tatcctatgaccctg

SEQ ID NO: 1275 - DNA, 15 bp, Artificial Sequence
  Description of Artificial Sequence: Synthetic oligonucleotide
ctgtgttgaccgggc

SEQ ID NO: 1276 - DNA, 15 bp, Artificial Sequence
  Description of Artificial Sequence: Synthetic oligonucleotide
gttttgtcgaataga

SEQ ID NO: 1277 - DNA, 15 bp, Artificial Sequence
  Description of Artificial Sequence: Synthetic oligonucleotide
ggtctccctctcatg

SEQ ID NO: 1278 - DNA, 15 bp, Artificial Sequence
  Description of Artificial Sequence: Synthetic oligonucleotide
gctaagattgcagcc

SEQ ID NO: 1279 - DNA, 15 bp, Artificial Sequence
  Description of Artificial Sequence: Synthetic oligonucleotide
ttaaatggattaagg

SEQ ID NO: 1280 - DNA, 15 bp, Artificial Sequence
  Description of Artificial Sequence: Synthetic oligonucleotide
tctggttcactcagt

SEQ ID NO: 1281 - DNA, 15 bp, Artificial Sequence
  Description of Artificial Sequence: Synthetic oligonucleotide
tgcccggccgccatc

SEQ ID NO: 1282 - DNA, 15 bp, Artificial Sequence
  Description of Artificial Sequence: Synthetic oligonucleotide
cgcccggccagccgc

SEQ ID NO: 1283 - DNA, 15 bp, Artificial Sequence
  Description of Artificial Sequence: Synthetic oligonucleotide
cccttctgggaagtg

SEQ ID NO: 1284 - DNA, 15 bp, Artificial Sequence
  Description of Artificial Sequence: Synthetic oligonucleotide
tccagctcctgaccg

SEQ ID NO: 1285 - DNA, 15 bp, Artificial Sequence
  Description of Artificial Sequence: Synthetic oligonucleotide
tggggagcgcctctg

SEQ ID NO: 1286 - DNA, 15 bp, Artificial Sequence
  Description of Artificial Sequence: Synthetic oligonucleotide
tcgagtgatctgccc

SEQ ID NO: 1287 - DNA, 15 bp, Artificial Sequence
  Description of Artificial Sequence: Synthetic oligonucleotide
gtccgggaggtgagg

SEQ ID NO: 1288 - DNA, 15 bp, Artificial Sequence
  Description of Artificial Sequence: Synthetic oligonucleotide
gcgattgcaggcgcg

SEQ ID NO: 1289 - DNA, 15 bp, Artificial Sequence
  Description of Artificial Sequence: Synthetic oligonucleotide
ttaaacagatgcttg

SEQ ID NO: 1290 - DNA, 15 bp, Artificial Sequence
  Description of Artificial Sequence: Synthetic oligonucleotide
tgttgcccaggctgg

SEQ ID NO: 1291 - DNA, 15 bp, Artificial Sequence
  Description of Artificial Sequence: Synthetic oligonucleotide
tcccgtctaggaagt

SEQ ID NO: 1292 - DNA, 15 bp, Artificial Sequence
  Description of Artificial Sequence: Synthetic oligonucleotide
ggtctccctctgatg

SEQ ID NO: 1293 - DNA, 15 bp, Artificial Sequence
  Description of Artificial Sequence: Synthetic oligonucleotide
ctgggattgcaggca

SEQ ID NO: 1294 - DNA, 15 bp, Artificial Sequence
  Description of Artificial Sequence: Synthetic oligonucleotide
ccaaagctggacggt

SEQ ID NO: 1295 - DNA, 15 bp, Artificial Sequence
  Description of Artificial Sequence: Synthetic oligonucleotide
tgactggttttcgtt

SEQ ID NO: 1296 - DNA, 15 bp, Artificial Sequence
  Description of Artificial Sequence: Synthetic oligonucleotide
aatccccctctgtga

SEQ ID NO: 1297 - DNA, 15 bp, Artificial Sequence
  Description of Artificial Sequence: Synthetic oligonucleotide
ttttttttggtggag

SEQ ID NO: 1298 - DNA, 15 bp, Artificial Sequence
  Description of Artificial Sequence: Synthetic oligonucleotide
tgttaatctataacc

SEQ ID NO: 1299 - DNA, 15 bp, Artificial Sequence
  Description of Artificial Sequence: Synthetic oligonucleotide
acccagggacacaaa

SEQ ID NO: 1300 - DNA, 15 bp, Artificial Sequence
  Description of Artificial Sequence: Synthetic oligonucleotide
cggcctgccgagtgc

SEQ ID NO: 1301 - DNA, 15 bp, Artificial Sequence
  Description of Artificial Sequence: Synthetic oligonucleotide
tattttttggtggag

SEQ ID NO: 1302 - DNA, 15 bp, Artificial Sequence
  Description of Artificial Sequence: Synthetic oligonucleotide
gcccctactgggaag

SEQ ID NO: 1303 - DNA, 15 bp, Artificial Sequence
  Description of Artificial Sequence: Synthetic oligonucleotide
cgtctgagatgtggg

SEQ ID NO: 1304 - DNA, 15 bp, Artificial Sequence
  Description of Artificial Sequence: Synthetic oligonucleotide
tgactggttttcgta

SEQ ID NO: 1305 - DNA, 15 bp, Artificial Sequence
  Description of Artificial Sequence: Synthetic oligonucleotide
gtgcctgggattgca

SEQ ID NO: 1306 - DNA, 15 bp, Artificial Sequence
  Description of Artificial Sequence: Synthetic oligonucleotide
tacccaacagctcat

SEQ ID NO: 1307 - DNA, 15 bp, Artificial Sequence
  Description of Artificial Sequence: Synthetic oligonucleotide
cgaaaagaaaagggg

SEQ ID NO: 1308 - DNA, 15 bp, Artificial Sequence
  Description of Artificial Sequence: Synthetic oligonucleotide
ggctggactgtactg

SEQ ID NO: 1309 - DNA, 15 bp, Artificial Sequence
  Description of Artificial Sequence: Synthetic oligonucleotide
ccaacagctcattga

SEQ ID NO: 1310 - DNA, 15 bp, Artificial Sequence
  Description of Artificial Sequence: Synthetic oligonucleotide
gggatcctgttgatc

SEQ ID NO: 1311 - DNA, 15 bp, Artificial Sequence
  Description of Artificial Sequence: Synthetic oligonucleotide
aaagggggaaatgtg

SEQ ID NO: 1312 - DNA, 15 bp, Artificial Sequence
  Description of Artificial Sequence: Synthetic oligonucleotide
ctgtactgccgtgat

SEQ ID NO: 1313 - DNA, 15 bp, Artificial Sequence
  Description of Artificial Sequence: Synthetic oligonucleotide
aggtgtacccaacag

SEQ ID NO: 1314 - DNA, 15 bp, Artificial Sequence
  Description of Artificial Sequence: Synthetic oligonucleotide
cccgtccgggaggtg

SEQ ID NO: 1315 - DNA, 15 bp, Artificial Sequence
  Description of Artificial Sequence: Synthetic oligonucleotide
tctcggctcgctgca

SEQ ID NO: 1316 - DNA, 15 bp, Artificial Sequence
  Description of Artificial Sequence: Synthetic oligonucleotide
aatcttaagtaccca

SEQ ID NO: 1317 - DNA, 15 bp, Artificial Sequence
  Description of Artificial Sequence: Synthetic oligonucleotide
cctcggcctcccgag

SEQ ID NO: 1318 - DNA, 15 bp, Artificial Sequence
  Description of Artificial Sequence: Synthetic oligonucleotide
agacctttgttcact

SEQ ID NO: 1319 - DNA, 15 bp, Artificial Sequence
  Description of Artificial Sequence: Synthetic oligonucleotide
atgatcaataaaaaa

SEQ ID NO: 1320 - DNA, 15 bp, Artificial Sequence
  Description of Artificial Sequence: Synthetic oligonucleotide
gccatcccgtctagg

SEQ ID NO: 1321 - DNA, 15 bp, Artificial Sequence
  Description of Artificial Sequence: Synthetic oligonucleotide
atttttttggtggag

SEQ ID NO: 1322 - DNA, 15 bp, Artificial Sequence
  Description of Artificial Sequence: Synthetic oligonucleotide
agaaaagggggaaat

SEQ ID NO: 1323 - DNA, 15 bp, Artificial Sequence
  Description of Artificial Sequence: Synthetic oligonucleotide
ttttcgttttttttt

SEQ ID NO: 1324 - DNA, 15 bp, Artificial Sequence
  Description of Artificial Sequence: Synthetic oligonucleotide
atgtggggagcgcct

SEQ ID NO: 1325 - DNA, 15 bp, Artificial Sequence
  Description of Artificial Sequence: Synthetic oligonucleotide
tctcaagtaatcagg

SEQ ID NO: 1326 - DNA, 15 bp, Artificial Sequence
  Description of Artificial Sequence: Synthetic oligonucleotide
gatcaataaatacta

SEQ ID NO: 1327 - DNA, 15 bp, Artificial Sequence
  Description of Artificial Sequence: Synthetic oligonucleotide
tctgctgaccttccc

SEQ ID NO: 1328 - DNA, 15 bp, Artificial Sequence
  Description of Artificial Sequence: Synthetic oligonucleotide
actgccgtgatctcg

SEQ ID NO: 1329 - DNA, 15 bp, Artificial Sequence
  Description of Artificial Sequence: Synthetic oligonucleotide
agctcattgagaacg

SEQ ID NO: 1330 - DNA, 15 bp, Artificial Sequence
  Description of Artificial Sequence: Synthetic oligonucleotide
atgtgaggagcgcct

SEQ ID NO: 1331 - DNA, 15 bp, Artificial Sequence
  Description of Artificial Sequence: Synthetic oligonucleotide
tactgtgtctgtgta

SEQ ID NO: 1332 - DNA, 15 bp, Artificial Sequence
  Description of Artificial Sequence: Synthetic oligonucleotide
gggaggtgtacccaa

SEQ ID NO: 1333 - DNA, 15 bp, Artificial Sequence
  Description of Artificial Sequence: Synthetic oligonucleotide
ggggggaaaggtggg

SEQ ID NO: 1334 - DNA, 15 bp, Artificial Sequence
  Description of Artificial Sequence: Synthetic oligonucleotide
gcctcgagtgatctg

SEQ ID NO: 1335 - DNA, 15 bp, Artificial Sequence
  Description of Artificial Sequence: Synthetic oligonucleotide
tctttctacggtctc

SEQ ID NO: 1336 - DNA, 15 bp, Artificial Sequence
  Description of Artificial Sequence: Synthetic oligonucleotide
gccccgtccgggagg

SEQ ID NO: 1337 - DNA, 15 bp, Artificial Sequence
  Description of Artificial Sequence: Synthetic oligonucleotide
tcggctcgctacaac

SEQ ID NO: 1338 - DNA, 15 bp, Artificial Sequence
  Description of Artificial Sequence: Synthetic oligonucleotide
gaccttatccccaac

SEQ ID NO: 1339 - DNA, 15 bp, Artificial Sequence
  Description of Artificial Sequence: Synthetic oligonucleotide
ctgatgccgagccga

SEQ ID NO: 1340 - DNA, 15 bp, Artificial Sequence
  Description of Artificial Sequence: Synthetic oligonucleotide
tgtgttggccgggcc

SEQ ID NO: 1341 - DNA, 15 bp, Artificial Sequence
  Description of Artificial Sequence: Synthetic oligonucleotide
accgggctggtctcc

SEQ ID NO: 1342 - DNA, 15 bp, Artificial Sequence
  Description of Artificial Sequence: Synthetic oligonucleotide
ctacggtctccctct

SEQ ID NO: 1343 - DNA, 15 bp, Artificial Sequence
  Description of Artificial Sequence: Synthetic oligonucleotide
gccatctcggctcac

SEQ ID NO: 1344 - DNA, 15 bp, Artificial Sequence
  Description of Artificial Sequence: Synthetic oligonucleotide
ctacacctcccagcc

SEQ ID NO: 1345 - DNA, 15 bp, Artificial Sequence
  Description of Artificial Sequence: Synthetic oligonucleotide
tttttgtattttttg

SEQ ID NO: 1346 - DNA, 15 bp, Artificial Sequence
  Description of Artificial Sequence: Synthetic oligonucleotide
tgtgttggccgggct

SEQ ID NO: 1347 - DNA, 15 bp, Artificial Sequence
  Description of Artificial Sequence: Synthetic oligonucleotide
ctctgcctaggaaaa

SEQ ID NO: 1348 - DNA, 15 bp, Artificial Sequence
  Description of Artificial Sequence: Synthetic oligonucleotide
ggacggtactgctgc

SEQ ID NO: 1349 - DNA, 15 bp, Artificial Sequence
  Description of Artificial Sequence: Synthetic oligonucleotide
cgggaagggtgggga

SEQ ID NO: 1350 - DNA, 15 bp, Artificial Sequence
  Description of Artificial Sequence: Synthetic oligonucleotide
cgcccggccgccatc

SEQ ID NO: 1351 - DNA, 15 bp, Artificial Sequence
  Description of Artificial Sequence: Synthetic oligonucleotide
tgctgtgtctgtgta

SEQ ID NO: 1352 - DNA, 15 bp, Artificial Sequence
  Description of Artificial Sequence: Synthetic oligonucleotide
atcaataaaaaaaaa

SEQ ID NO: 1353 - DNA, 15 bp, Artificial Sequence
  Description of Artificial Sequence: Synthetic oligonucleotide
ggtctccagctccta

SEQ ID NO: 1354 - DNA, 15 bp, Artificial Sequence
  Description of Artificial Sequence: Synthetic oligonucleotide
gctcattgagaacgg

SEQ ID NO: 1355 - DNA, 15 bp, Artificial Sequence
  Description of Artificial Sequence: Synthetic oligonucleotide
ggtctccagctcctg

SEQ ID NO: 1356 - DNA, 15 bp, Artificial Sequence
  Description of Artificial Sequence: Synthetic oligonucleotide
tctaggaagtgagga

SEQ ID NO: 1357 - DNA, 15 bp, Artificial Sequence
  Description of Artificial Sequence: Synthetic oligonucleotide
gttaaatggattaag

SEQ ID NO: 1358 - DNA, 15 bp, Artificial Sequence
  Description of Artificial Sequence: Synthetic oligonucleotide
ggggaaaagattgag

SEQ ID NO: 1359 - DNA, 15 bp, Artificial Sequence
  Description of Artificial Sequence: Synthetic oligonucleotide
ccctctctccacggt

SEQ ID NO: 1360 - DNA, 15 bp, Artificial Sequence
  Description of Artificial Sequence: Synthetic oligonucleotide
ggagcgcctccgccc

SEQ ID NO: 1361 - DNA, 15 bp, Artificial Sequence
  Description of Artificial Sequence: Synthetic oligonucleotide
agccgaagctggact

SEQ ID NO: 1362 - DNA, 15 bp, Artificial Sequence
  Description of Artificial Sequence: Synthetic oligonucleotide
cgccccgtctgggaa

SEQ ID NO: 1363 - DNA, 15 bp, Artificial Sequence
  Description of Artificial Sequence: Synthetic oligonucleotide
agcgcctctgcccgg

SEQ ID NO: 1364 - DNA, 15 bp, Artificial Sequence
  Description of Artificial Sequence: Synthetic oligonucleotide
ccagccgccccgtcc

SEQ ID NO: 1365 - DNA, 15 bp, Artificial Sequence
  Description of Artificial Sequence: Synthetic oligonucleotide
tgatcaataaaaaaa

SEQ ID NO: 1366 - DNA, 15 bp, Artificial Sequence
  Description of Artificial Sequence: Synthetic oligonucleotide
caaccctgtgctctc

SEQ ID NO: 1367 - DNA, 15 bp, Artificial Sequence
  Description of Artificial Sequence: Synthetic oligonucleotide
aaggcgggaagggtg

SEQ ID NO: 1368 - DNA, 15 bp, Artificial Sequence
  Description of Artificial Sequence: Synthetic oligonucleotide
gtactgctgccatct

SEQ ID NO: 1369 - DNA, 15 bp, Artificial Sequence
  Description of Artificial Sequence: Synthetic oligonucleotide
tgttgccgaggctgg

SEQ ID NO: 1370 - DNA, 15 bp, Artificial Sequence
  Description of Artificial Sequence: Synthetic oligonucleotide
ccagccgccccgtct

SEQ ID NO: 1371 - DNA, 15 bp, Artificial Sequence
  Description of Artificial Sequence: Synthetic oligonucleotide
tgaaacatgtgctgt

SEQ ID NO: 1372 - DNA, 15 bp, Artificial Sequence
  Description of Artificial Sequence: Synthetic oligonucleotide
gagattgcagcctct

SEQ ID NO: 1373 - DNA, 15 bp, Artificial Sequence
  Description of Artificial Sequence: Synthetic oligonucleotide
caaatccccctctcc

SEQ ID NO: 1374 - DNA, 15 bp, Artificial Sequence
  Description of Artificial Sequence: Synthetic oligonucleotide
ggcgcgcgccgccac

SEQ ID NO: 1375 - DNA, 15 bp, Artificial Sequence
  Description of Artificial Sequence: Synthetic oligonucleotide
aagtagacatgggag

SEQ ID NO: 1376 - DNA, 15 bp, Artificial Sequence
  Description of Artificial Sequence: Synthetic oligonucleotide
tcctatgaccctgcc

SEQ ID NO: 1377 - DNA, 15 bp, Artificial Sequence
  Description of Artificial Sequence: Synthetic oligonucleotide
atgcttgaaggcagc

SEQ ID NO: 1378 - DNA, 15 bp, Artificial Sequence
  Description of Artificial Sequence: Synthetic oligonucleotide
tccccctctgtgaga

SEQ ID NO: 1379 - DNA, 15 bp, Artificial Sequence
  Description of Artificial Sequence: Synthetic oligonucleotide
attgcagacggagtc

SEQ ID NO: 1380 - DNA, 15 bp, Artificial Sequence
  Description of Artificial Sequence: Synthetic oligonucleotide
ccttacccccaaccc

SEQ ID NO: 1381 - DNA, 15 bp, Artificial Sequence
  Description of Artificial Sequence: Synthetic oligonucleotide
ctggactgtactgcc

SEQ ID NO: 1382 - DNA, 15 bp, Artificial Sequence
  Description of Artificial Sequence: Synthetic oligonucleotide
ggacctctgcctagg

SEQ ID NO: 1383 - DNA, 15 bp, Artificial Sequence
  Description of Artificial Sequence: Synthetic oligonucleotide
cgccccgtctgggag

SEQ ID NO: 1384 - DNA, 15 bp, Artificial Sequence
  Description of Artificial Sequence: Synthetic oligonucleotide
cacttgtttatctgc

SEQ ID NO: 1385 - DNA, 15 bp, Artificial Sequence
  Description of Artificial Sequence: Synthetic oligonucleotide
ctgcaacctccctgc

SEQ ID NO: 1386 - DNA, 15 bp, Artificial Sequence
  Description of Artificial Sequence: Synthetic oligonucleotide
tgcgattgcaggcac

SEQ ID NO: 1387 - DNA, 15 bp, Artificial Sequence
  Description of Artificial Sequence: Synthetic oligonucleotide
ctctgttgccgaggc

SEQ ID NO: 1388 - DNA, 15 bp, Artificial Sequence
  Description of Artificial Sequence: Synthetic oligonucleotide
aaggccgcagggacc

SEQ ID NO: 1389 - DNA, 15 bp, Artificial Sequence
  Description of Artificial Sequence: Synthetic oligonucleotide
tgcctcggcctgccg

SEQ ID NO: 1390 - DNA, 15 bp, Artificial Sequence
  Description of Artificial Sequence: Synthetic oligonucleotide
gctcaatgttgccca

SEQ ID NO: 1391 - DNA, 15 bp, Artificial Sequence
  Description of Artificial Sequence: Synthetic oligonucleotide
cctctccctctcccc

SEQ ID NO: 1392 - DNA, 15 bp, Artificial Sequence
  Description of Artificial Sequence: Synthetic oligonucleotide
gggaggtgaggggcg

SEQ ID NO: 1393 - DNA, 15 bp, Artificial Sequence
  Description of Artificial Sequence: Synthetic oligonucleotide
gaggtggggggcgcc

SEQ ID NO: 1394 - DNA, 15 bp, Artificial Sequence
  Description of Artificial Sequence: Synthetic oligonucleotide
cagccgccccgtctg

SEQ ID NO: 1395 - DNA, 15 bp, Artificial Sequence
  Description of Artificial Sequence: Synthetic oligonucleotide
atgtgctgtgtccac

SEQ ID NO: 1396 - DNA, 15 bp, Artificial Sequence
  Description of Artificial Sequence: Synthetic oligonucleotide
cctctccctctccct

SEQ ID NO: 1397 - DNA, 15 bp, Artificial Sequence
  Description of Artificial Sequence: Synthetic oligonucleotide
ttcttctgccttggg

SEQ ID NO: 1398 - DNA, 15 bp, Artificial Sequence
  Description of Artificial Sequence: Synthetic oligonucleotide
ggagacttttcattt

SEQ ID NO: 1399 - DNA, 15 bp, Artificial Sequence
  Description of Artificial Sequence: Synthetic oligonucleotide
ggtttcgccgtgttg

SEQ ID NO: 1400 - DNA, 15 bp, Artificial Sequence
  Description of Artificial Sequence: Synthetic oligonucleotide
gcctcgggctccagt

SEQ ID NO: 1401 - DNA, 15 bp, Artificial Sequence
  Description of Artificial Sequence: Synthetic oligonucleotide
agctcctgaccgcga

SEQ ID NO: 1402 - DNA, 15 bp, Artificial Sequence
  Description of Artificial Sequence: Synthetic oligonucleotide
ctgcgattgcaggca

SEQ ID NO: 1403 - DNA, 15 bp, Artificial Sequence
  Description of Artificial Sequence: Synthetic oligonucleotide
ctgcgattgcaggcg

SEQ ID NO: 1404 - DNA, 15 bp, Artificial Sequence
  Description of Artificial Sequence: Synthetic oligonucleotide
gcctgccgagtgcct

SEQ ID NO: 1405 - DNA, 15 bp, Artificial Sequence
  Description of Artificial Sequence: Synthetic oligonucleotide
ttcccggccgccatc

SEQ ID NO: 1406 - DNA, 15 bp, Artificial Sequence
  Description of Artificial Sequence: Synthetic oligonucleotide
ctggactgtactgct

SEQ ID NO: 1407 - DNA, 15 bp, Artificial Sequence
  Description of Artificial Sequence: Synthetic oligonucleotide
cagattgttactgtg

SEQ ID NO: 1408 - DNA, 15 bp, Artificial Sequence
  Description of Artificial Sequence: Synthetic oligonucleotide
taaatactaaaaaaa

SEQ ID NO: 1409 - DNA, 15 bp, Artificial Sequence
  Description of Artificial Sequence: Synthetic oligonucleotide
aggagcgcctccgcc

SEQ ID NO: 1410 - DNA, 15 bp, Artificial Sequence
  Description of Artificial Sequence: Synthetic oligonucleotide
cgccccgtctgggat

SEQ ID NO: 1411 - DNA, 15 bp, Artificial Sequence
  Description of Artificial Sequence: Synthetic oligonucleotide
ggaaatgtggggaaa

SEQ ID NO: 1412 - DNA, 15 bp, Artificial Sequence
  Description of Artificial Sequence: Synthetic oligonucleotide
ctccacctcccagcc

SEQ ID NO: 1413 - DNA, 15 bp, Artificial Sequence
  Description of Artificial Sequence: Synthetic oligonucleotide
gtactgccgccatct

SEQ ID NO: 1414 - DNA, 15 bp, Artificial Sequence
  Description of Artificial Sequence: Synthetic oligonucleotide
tcttctgccttggga

SEQ ID NO: 1415 - DNA, 15 bp, Artificial Sequence
  Description of Artificial Sequence: Synthetic oligonucleotide
gtgaggagcccctct

SEQ ID NO: 1416 - DNA, 15 bp, Artificial Sequence
  Description of Artificial Sequence: Synthetic oligonucleotide
gagcacctctgcccc

SEQ ID NO: 1417 - DNA, 15 bp, Artificial Sequence
  Description of Artificial Sequence: Synthetic oligonucleotide
ttatcctatgaccct

SEQ ID NO: 1418 - DNA, 15 bp, Artificial Sequence
  Description of Artificial Sequence: Synthetic oligonucleotide
cttaagtacccaggg

SEQ ID NO: 1419 - DNA, 15 bp, Artificial Sequence
  Description of Artificial Sequence: Synthetic oligonucleotide
gatgtgaggagcgcc

SEQ ID NO: 1420 - DNA, 15 bp, Artificial Sequence
  Description of Artificial Sequence: Synthetic oligonucleotide
cccagtctgggaagt

SEQ ID NO: 1421 - DNA, 15 bp, Artificial Sequence
  Description of Artificial Sequence: Synthetic oligonucleotide
gatcagattgttact

SEQ ID NO: 1422 - DNA, 15 bp, Artificial Sequence
  Description of Artificial Sequence: Synthetic oligonucleotide
ccgccagcctcggcc

SEQ ID NO: 1423 - DNA, 15 bp, Artificial Sequence
  Description of Artificial Sequence: Synthetic oligonucleotide
tgtcccctctttcca

SEQ ID NO: 1424 - DNA, 15 bp, Artificial Sequence
  Description of Artificial Sequence: Synthetic oligonucleotide
acttgtttatctgct

SEQ ID NO: 1425 - DNA, 15 bp, Artificial Sequence
  Description of Artificial Sequence: Synthetic oligonucleotide
ctctctgaaacatgt

SEQ ID NO: 1426 - DNA, 15 bp, Artificial Sequence
  Description of Artificial Sequence: Synthetic oligonucleotide
gacggtactgctgcc

SEQ ID NO: 1427 - DNA, 15 bp, Artificial Sequence
  Description of Artificial Sequence: Synthetic oligonucleotide
gcacgcgccgccacg

SEQ ID NO: 1428 - DNA, 15 bp, Artificial Sequence
  Description of Artificial Sequence: Synthetic oligonucleotide
ggagcgcctcttccc

SEQ ID NO: 1429 - DNA, 15 bp, Artificial Sequence
  Description of Artificial Sequence: Synthetic oligonucleotide
cattttgttctgtac

SEQ ID NO: 1430 - DNA, 15 bp, Artificial Sequence
  Description of Artificial Sequence: Synthetic oligonucleotide
ggaggtgtgcccagc

SEQ ID NO: 1431 - DNA, 15 bp, Artificial Sequence
  Description of Artificial Sequence: Synthetic oligonucleotide
aaccgcgagtgatcc

SEQ ID NO: 1432 - DNA, 15 bp, Artificial Sequence
  Description of Artificial Sequence: Synthetic oligonucleotide
gtactgccgtgatct

SEQ ID NO: 1433 - DNA, 15 bp, Artificial Sequence
  Description of Artificial Sequence: Synthetic oligonucleotide
caagatgtgctttgt

SEQ ID NO: 1434 - DNA, 15 bp, Artificial Sequence
  Description of Artificial Sequence: Synthetic oligonucleotide
cctcagcctgccgag

SEQ ID NO: 1435 - DNA, 15 bp, Artificial Sequence
  Description of Artificial Sequence: Synthetic oligonucleotide
tgcaacctccctgcc

SEQ ID NO: 1436 - DNA, 15 bp, Artificial Sequence
  Description of Artificial Sequence: Synthetic oligonucleotide
cctcgggctccagtg

SEQ ID NO: 1437 - DNA, 15 bp, Artificial Sequence
  Description of Artificial Sequence: Synthetic oligonucleotide
ccctctgcgagaaac

SEQ ID NO: 1438 - DNA, 15 bp, Artificial Sequence
  Description of Artificial Sequence: Synthetic oligonucleotide
cagtgctcaatgttg

SEQ ID NO: 1439 - DNA, 15 bp, Artificial Sequence
  Description of Artificial Sequence: Synthetic oligonucleotide
ggagcgtctctgcct

SEQ ID NO: 1440 - DNA, 15 bp, Artificial Sequence
  Description of Artificial Sequence: Synthetic oligonucleotide
gccgtgatctcggct

SEQ ID NO: 1441 - DNA, 15 bp, Artificial Sequence
  Description of Artificial Sequence: Synthetic oligonucleotide
cctctgcccggccgc

SEQ ID NO: 1442 - DNA, 15 bp, Artificial Sequence
  Description of Artificial Sequence: Synthetic oligonucleotide
catgcggagccgaag

SEQ ID NO: 1443 - DNA, 15 bp, Artificial Sequence
  Description of Artificial Sequence: Synthetic oligonucleotide
cttcattttgttctg

SEQ ID NO: 1444 - DNA, 15 bp, Artificial Sequence
  Description of Artificial Sequence: Synthetic oligonucleotide
gaggtgtgcccagcg

SEQ ID NO: 1445 - DNA, 15 bp, Artificial Sequence
  Description of Artificial Sequence: Synthetic oligonucleotide
ggagcgtctctgccc

SEQ ID NO: 1446 - DNA, 15 bp, Artificial Sequence
  Description of Artificial Sequence: Synthetic oligonucleotide
tctataaccttaccc

SEQ ID NO: 1447 - DNA, 15 bp, Artificial Sequence
  Description of Artificial Sequence: Synthetic oligonucleotide
gggtcctctgcctag

SEQ ID NO: 1448 - DNA, 15 bp, Artificial Sequence
  Description of Artificial Sequence: Synthetic oligonucleotide
acatgggagactttt

SEQ ID NO: 1449 - DNA, 15 bp, Artificial Sequence
  Description of Artificial Sequence: Synthetic oligonucleotide
ctttctacggtctcc

SEQ ID NO: 1450 - DNA, 15 bp, Artificial Sequence
  Description of Artificial Sequence: Synthetic oligonucleotide
acccccaaccctgtg

SEQ ID NO: 1451 - DNA, 15 bp, Artificial Sequence
  Description of Artificial Sequence: Synthetic oligonucleotide
tgatgacaatggcgg

SEQ ID NO: 1452 - DNA, 15 bp, Artificial Sequence
  Description of Artificial Sequence: Synthetic oligonucleotide
tgggaggtggggggc

SEQ ID NO: 1453 - DNA, 15 bp, Artificial Sequence
  Description of Artificial Sequence: Synthetic oligonucleotide
cctccgcccggccgc

SEQ ID NO: 1454 - DNA, 15 bp, Artificial Sequence
  Description of Artificial Sequence: Synthetic oligonucleotide
tgacgatggcggttt

SEQ ID NO: 1455 - DNA, 15 bp, Artificial Sequence
  Description of Artificial Sequence: Synthetic oligonucleotide
tctccctctgttgcc

SEQ ID NO: 1456 - DNA, 15 bp, Artificial Sequence
  Description of Artificial Sequence: Synthetic oligonucleotide
cggccgccaccccgt

SEQ ID NO: 1457 - DNA, 15 bp, Artificial Sequence
  Description of Artificial Sequence: Synthetic oligonucleotide
aaaaaaaattaaaaa

SEQ ID NO: 1458 - DNA, 15 bp, Artificial Sequence
  Description of Artificial Sequence: Synthetic oligonucleotide
aaatggattaagggc

SEQ ID NO: 1459 - DNA, 15 bp, Artificial Sequence
  Description of Artificial Sequence: Synthetic oligonucleotide
cattgagaacgggcc

SEQ ID NO: 1460 - DNA, 15 bp, Artificial Sequence
  Description of Artificial Sequence: Synthetic oligonucleotide
ggatgtggggagcac

SEQ ID NO: 1461 - DNA, 15 bp, Artificial Sequence
  Description of Artificial Sequence: Synthetic oligonucleotide
tgtggggaaaagaaa

SEQ ID NO: 1462 - DNA, 15 bp, Artificial Sequence
  Description of Artificial Sequence: Synthetic oligonucleotide
cgtctgggaggaggt

SEQ ID NO: 1463 - DNA, 15 bp, Artificial Sequence
  Description of Artificial Sequence: Synthetic oligonucleotide
catcgtctgagatgt

SEQ ID NO: 1464 - DNA, 15 bp, Artificial Sequence
  Description of Artificial Sequence: Synthetic oligonucleotide
cggccaccaccccgt

SEQ ID NO: 1465 - DNA, 15 bp, Artificial Sequence
  Description of Artificial Sequence: Synthetic oligonucleotide
ccctctccgagaaac

SEQ ID NO: 1466 - DNA, 15 bp, Artificial Sequence
  Description of Artificial Sequence: Synthetic oligonucleotide
cccggccaccgcccc

SEQ ID NO: 1467 - DNA, 15 bp, Artificial Sequence
  Description of Artificial Sequence: Synthetic oligonucleotide
gtacccaacagctca

SEQ ID NO: 1468 - DNA, 15 bp, Artificial Sequence
  Description of Artificial Sequence: Synthetic oligonucleotide
ggagtctcgttcact

SEQ ID NO: 1469 - DNA, 15 bp, Artificial Sequence
  Description of Artificial Sequence: Synthetic oligonucleotide
acacccaagaatgat

SEQ ID NO: 1470 - DNA, 15 bp, Artificial Sequence
  Description of Artificial Sequence: Synthetic oligonucleotide
tcgtctgggatgtgg

SEQ ID NO: 1471 - DNA, 15 bp, Artificial Sequence
  Description of Artificial Sequence: Synthetic oligonucleotide
gcgagaaacacccaa

SEQ ID NO: 1472 - DNA, 15 bp, Artificial Sequence
  Description of Artificial Sequence: Synthetic oligonucleotide
tcgtctgggatgtga

SEQ ID NO: 1473 - DNA, 15 bp, Artificial Sequence
  Description of Artificial Sequence: Synthetic oligonucleotide
tctccctctgatgcc

SEQ ID NO: 1474 - DNA, 15 bp, Artificial Sequence
  Description of Artificial Sequence: Synthetic oligonucleotide
ggaagtgaggagcgt

SEQ ID NO: 1475 - DNA, 15 bp, Artificial Sequence
  Description of Artificial Sequence: Synthetic oligonucleotide
ctcaatgttgcccag

SEQ ID NO: 1476 - DNA, 15 bp, Artificial Sequence
  Description of Artificial Sequence: Synthetic oligonucleotide
cctggccgcccatcg

SEQ ID NO: 1477 - DNA, 15 bp, Artificial Sequence
  Description of Artificial Sequence: Synthetic oligonucleotide
gaaaaaattgagaaa

SEQ ID NO: 1478 - DNA, 15 bp, Artificial Sequence
  Description of Artificial Sequence: Synthetic oligonucleotide
atgggagacttttca

SEQ ID NO: 1479 - DNA, 15 bp, Artificial Sequence
  Description of Artificial Sequence: Synthetic oligonucleotide
agcccctaaccgcga

SEQ ID NO: 1480 - DNA, 15 bp, Artificial Sequence
  Description of Artificial Sequence: Synthetic oligonucleotide
catcccgtctaggaa

SEQ ID NO: 1481 - DNA, 15 bp, Artificial Sequence
  Description of Artificial Sequence: Synthetic oligonucleotide
tgttactgtgtctgt

SEQ ID NO: 1482 - DNA, 15 bp, Artificial Sequence
  Description of Artificial Sequence: Synthetic oligonucleotide
cgagtgatctgcccg

SEQ ID NO: 1483 - DNA, 15 bp, Artificial Sequence
  Description of Artificial Sequence: Synthetic oligonucleotide
ggccgccccgtctgg

SEQ ID NO: 1484 - DNA, 15 bp, Artificial Sequence
  Description of Artificial Sequence: Synthetic oligonucleotide
ctcccgaggtgctgg

SEQ ID NO: 1485 - DNA, 15 bp, Artificial Sequence
  Description of Artificial Sequence: Synthetic oligonucleotide
gtgttggccgggccg

SEQ ID NO: 1486 - DNA, 15 bp, Artificial Sequence
  Description of Artificial Sequence: Synthetic oligonucleotide
cccaggctggagtgc

SEQ ID NO: 1487 - DNA, 15 bp, Artificial Sequence
  Description of Artificial Sequence: Synthetic oligonucleotide
gaccattgagaacgg

SEQ ID NO: 1488 - DNA, 15 bp, Artificial Sequence
  Description of Artificial Sequence: Synthetic oligonucleotide
tctcatgcggagccg

SEQ ID NO: 1489 - DNA, 15 bp, Artificial Sequence
  Description of Artificial Sequence: Synthetic oligonucleotide
caccaccccgtctgg

SEQ ID NO: 1490 - DNA, 15 bp, Artificial Sequence
  Description of Artificial Sequence: Synthetic oligonucleotide
gtgaggagcgtctct

SEQ ID NO: 1491 - DNA, 15 bp, Artificial Sequence
  Description of Artificial Sequence: Synthetic oligonucleotide
aaccagagacctttg

SEQ ID NO: 1492 - DNA, 15 bp, Artificial Sequence
  Description of Artificial Sequence: Synthetic oligonucleotide
cccctactgggaagt

SEQ ID NO: 1493 - DNA, 15 bp, Artificial Sequence
  Description of Artificial Sequence: Synthetic oligonucleotide
actattatcctatga

SEQ ID NO: 1494 - DNA, 15 bp, Artificial Sequence
  Description of Artificial Sequence: Synthetic oligonucleotide
agtgaggagcgcctc

SEQ ID NO: 1495 - DNA, 15 bp, Artificial Sequence
  Description of Artificial Sequence: Synthetic oligonucleotide
ttgttctgtactaag

SEQ ID NO: 1496 - DNA, 15 bp, Artificial Sequence
  Description of Artificial Sequence: Synthetic oligonucleotide
aaatccccctctccg

SEQ ID NO: 1497 - DNA, 15 bp, Artificial Sequence
  Description of Artificial Sequence: Synthetic oligonucleotide
gctttgtggaataga

SEQ ID NO: 1498 - DNA, 15 bp, Artificial Sequence
  Description of Artificial Sequence: Synthetic oligonucleotide
cagatgcttgaaggc

SEQ ID NO: 1499 - DNA, 15 bp, Artificial Sequence
  Description of Artificial Sequence: Synthetic oligonucleotide
gctgtgtctgtgtag

SEQ ID NO: 1500 - DNA, 15 bp, Artificial Sequence
  Description of Artificial Sequence: Synthetic oligonucleotide
ctattgtcccatgac

SEQ ID NO: 1501 - DNA, 15 bp, Artificial Sequence
  Description of Artificial Sequence: Synthetic oligonucleotide
tcactcagtgctcaa

SEQ ID NO: 1502 - DNA, 15 bp, Artificial Sequence
  Description of Artificial Sequence: Synthetic oligonucleotide
tggggggcgcctctg

SEQ ID NO: 1503 - DNA, 15 bp, Artificial Sequence
  Description of Artificial Sequence: Synthetic oligonucleotide
ccggccagccgcccc

SEQ ID NO: 1504 - DNA, 15 bp, Artificial Sequence
  Description of Artificial Sequence: Synthetic oligonucleotide
ctggccgcccagtct

SEQ ID NO: 1505 - DNA, 15 bp, Artificial Sequence
  Description of Artificial Sequence: Synthetic oligonucleotide
aagaagtagacatgg

SEQ ID NO: 1506 - DNA, 15 bp, Artificial Sequence
  Description of Artificial Sequence: Synthetic oligonucleotide
aaattaaaaaaaaaa

SEQ ID NO: 1507 - DNA, 15 bp, Artificial Sequence
  Description of Artificial Sequence: Synthetic oligonucleotide
ctgcccggccgccac

SEQ ID NO: 1508 - DNA, 15 bp, Artificial Sequence
  Description of Artificial Sequence: Synthetic oligonucleotide
ggagccgaagctgga

SEQ ID NO: 1509 - DNA, 15 bp, Artificial Sequence
  Description of Artificial Sequence: Synthetic oligonucleotide
cctctgcctggccgc

SEQ ID NO: 1510 - DNA, 15 bp, Artificial Sequence
  Description of Artificial Sequence: Synthetic oligonucleotide
ggtctccagccccta

SEQ ID NO: 1511 - DNA, 15 bp, Artificial Sequence
  Description of Artificial Sequence: Synthetic oligonucleotide
ctgcccggccgccat

SEQ ID NO: 1512 - DNA, 15 bp, Artificial Sequence
  Description of Artificial Sequence: Synthetic oligonucleotide
aacagatgcttgaag

SEQ ID NO: 1513 - DNA, 15 bp, Artificial Sequence
  Description of Artificial Sequence: Synthetic oligonucleotide
attgtcccatgaccc

SEQ ID NO: 1514 - DNA, 15 bp, Artificial Sequence
  Description of Artificial Sequence: Synthetic oligonucleotide
gtcctatgaccctgc

SEQ ID NO: 1515 - DNA, 15 bp, Artificial Sequence
  Description of Artificial Sequence: Synthetic oligonucleotide
gaggctggactgtac

SEQ ID NO: 1516 - DNA, 15 bp, Artificial Sequence
  Description of Artificial Sequence: Synthetic oligonucleotide
tccctctcatgcgga

SEQ ID NO: 1517 - DNA, 15 bp, Artificial Sequence
  Description of Artificial Sequence: Synthetic oligonucleotide
gggccaggatgacaa

SEQ ID NO: 1518 - DNA, 15 bp, Artificial Sequence
  Description of Artificial Sequence: Synthetic oligonucleotide
ttttgtattttttgg

SEQ ID NO: 1519 - DNA, 15 bp, Artificial Sequence
  Description of Artificial Sequence: Synthetic oligonucleotide
gaaaagattgagaaa

SEQ ID NO: 1520 - DNA, 15 bp, Artificial Sequence
  Description of Artificial Sequence: Synthetic oligonucleotide
ctctccctctccctc

SEQ ID NO: 1521 - DNA, 15 bp, Artificial Sequence
  Description of Artificial Sequence: Synthetic oligonucleotide
cgtctgggatgtggg

SEQ ID NO: 1522 - DNA, 15 bp, Artificial Sequence
  Description of Artificial Sequence: Synthetic oligonucleotide
gtatttttggtggag

SEQ ID NO: 1523 - DNA, 15 bp, Artificial Sequence
  Description of Artificial Sequence: Synthetic oligonucleotide
tgcctcgggctccag

SEQ ID NO: 1524 - DNA, 15 bp, Artificial Sequence
  Description of Artificial Sequence: Synthetic oligonucleotide
ggccgggctggtctc

SEQ ID NO: 1525 - DNA, 15 bp, Artificial Sequence
  Description of Artificial Sequence: Synthetic oligonucleotide
aacctacacctccca

SEQ ID NO: 1526 - DNA, 15 bp, Artificial Sequence
  Description of Artificial Sequence: Synthetic oligonucleotide
ctctttctacggtct

SEQ ID NO: 1527 - DNA, 15 bp, Artificial Sequence
  Description of Artificial Sequence: Synthetic oligonucleotide
ccatcccgtctggga

SEQ ID NO: 1528 - DNA, 15 bp, Artificial Sequence
  Description of Artificial Sequence: Synthetic oligonucleotide
gggacctctgcctag

SEQ ID NO: 1529 - DNA, 15 bp, Artificial Sequence
  Description of Artificial Sequence: Synthetic oligonucleotide
cccatcgtctgggat

SEQ ID NO: 1530 - DNA, 15 bp, Artificial Sequence
  Description of Artificial Sequence: Synthetic oligonucleotide
ctgatgccgagccaa

SEQ ID NO: 1531 - DNA, 15 bp, Artificial Sequence
  Description of Artificial Sequence: Synthetic oligonucleotide
agtgatccgccagcc

SEQ ID NO: 1532 - DNA, 15 bp, Artificial Sequence
  Description of Artificial Sequence: Synthetic oligonucleotide
tctctccactattat

SEQ ID NO: 1533 - DNA, 15 bp, Artificial Sequence
  Description of Artificial Sequence: Synthetic oligonucleotide
gccatcccatctagg

SEQ ID NO: 1534 - DNA, 15 bp, Artificial Sequence
  Description of Artificial Sequence: Synthetic oligonucleotide
tttcgctgtgttggc

SEQ ID NO: 1535 - DNA, 15 bp, Artificial Sequence
  Description of Artificial Sequence: Synthetic oligonucleotide
ccgccgccccgtctg

SEQ ID NO: 1536 - DNA, 15 bp, Artificial Sequence
  Description of Artificial Sequence: Synthetic oligonucleotide
gtttttgtatttttg

SEQ ID NO: 1537 - DNA, 15 bp, Artificial Sequence
  Description of Artificial Sequence: Synthetic oligonucleotide
tgtagaaagaagtag

SEQ ID NO: 1538 - DNA, 15 bp, Artificial Sequence
  Description of Artificial Sequence: Synthetic oligonucleotide
ccgccacgcctgact

SEQ ID NO: 1539 - DNA, 15 bp, Artificial Sequence
  Description of Artificial Sequence: Synthetic oligonucleotide
tgcccaacagctcat

SEQ ID NO: 1540 - DNA, 15 bp, Artificial Sequence
  Description of Artificial Sequence: Synthetic oligonucleotide
gatgccgagccgaag

SEQ ID NO: 1541 - DNA, 15 bp, Artificial Sequence
  Description of Artificial Sequence: Synthetic oligonucleotide
taagattgcagcctc

SEQ ID NO: 1542 - DNA, 15 bp, Artificial Sequence
  Description of Artificial Sequence: Synthetic oligonucleotide
tcgctacaacctcca

SEQ ID NO: 1543 - DNA, 15 bp, Artificial Sequence
  Description of Artificial Sequence: Synthetic oligonucleotide
gtttttgtatttttt

SEQ ID NO: 1544 - DNA, 15 bp, Artificial Sequence
  Description of Artificial Sequence: Synthetic oligonucleotide
atcctgttgatctgt

SEQ ID NO: 1545 - DNA, 15 bp, Artificial Sequence
  Description of Artificial Sequence: Synthetic oligonucleotide
gccgagattgcagcc

SEQ ID NO: 1546 - DNA, 15 bp, Artificial Sequence
  Description of Artificial Sequence: Synthetic oligonucleotide
tcagtgctcaatggt

SEQ ID NO: 1547 - DNA, 15 bp, Artificial Sequence
  Description of Artificial Sequence: Synthetic oligonucleotide
accctgccaaatccc

SEQ ID NO: 1548 - DNA, 15 bp, Artificial Sequence
  Description of Artificial Sequence: Synthetic oligonucleotide
tccactattgtccca

SEQ ID NO: 1549 - DNA, 15 bp, Artificial Sequence
  Description of Artificial Sequence: Synthetic oligonucleotide
ggactgtactgctgc

SEQ ID NO: 1550 - DNA, 15 bp, Artificial Sequence
  Description of Artificial Sequence: Synthetic oligonucleotide
tgtgtggatagaagt

SEQ ID NO: 1551 - DNA, 15 bp, Artificial Sequence
  Description of Artificial Sequence: Synthetic oligonucleotide
tctgggaggtgtacc

SEQ ID NO: 1552 - DNA, 15 bp, Artificial Sequence
  Description of Artificial Sequence: Synthetic oligonucleotide
tcattgagaacgggc

SEQ ID NO: 1553 - DNA, 15 bp, Artificial Sequence
  Description of Artificial Sequence: Synthetic oligonucleotide
gatgacgatggcggt

SEQ ID NO: 1554 - DNA, 15 bp, Artificial Sequence
  Description of Artificial Sequence: Synthetic oligonucleotide
cctgggattgcaggc

SEQ ID NO: 1555 - DNA, 15 bp, Artificial Sequence
  Description of Artificial Sequence: Synthetic oligonucleotide
acggagtctcgttca

SEQ ID NO: 1556 - DNA, 15 bp, Artificial Sequence
  Description of Artificial Sequence: Synthetic oligonucleotide
gcaggcgcgcgccgc

SEQ ID NO: 1557 - DNA, 15 bp, Artificial Sequence
  Description of Artificial Sequence: Synthetic oligonucleotide
gagcgcctcttcccg

SEQ ID NO: 1558 - DNA, 15 bp, Artificial Sequence
  Description of Artificial Sequence: Synthetic oligonucleotide
cctctgcccggccag

SEQ ID NO: 1559 - DNA, 15 bp, Artificial Sequence
  Description of Artificial Sequence: Synthetic oligonucleotide
ccagccgcctgcctt

SEQ ID NO: 1560 - DNA, 15 bp, Artificial Sequence
  Description of Artificial Sequence: Synthetic oligonucleotide
ggaggtgtgcccaac

SEQ ID NO: 1561 - DNA, 15 bp, Artificial Sequence
  Description of Artificial Sequence: Synthetic oligonucleotide
aagaaaaattcttct

SEQ ID NO: 1562 - DNA, 15 bp, Artificial Sequence
  Description of Artificial Sequence: Synthetic oligonucleotide
tacccccaaccccgt

SEQ ID NO: 1563 - DNA, 15 bp, Artificial Sequence
  Description of Artificial Sequence: Synthetic oligonucleotide
ttgcagacggagtct

SEQ ID NO: 1564 - DNA, 15 bp, Artificial Sequence
  Description of Artificial Sequence: Synthetic oligonucleotide
gaccttctctccact

SEQ ID NO: 1565 - DNA, 15 bp, Artificial Sequence
  Description of Artificial Sequence: Synthetic oligonucleotide
accacctcccagccg

SEQ ID NO: 1566 - DNA, 15 bp, Artificial Sequence
  Description of Artificial Sequence: Synthetic oligonucleotide
tctcccctctttcca

SEQ ID NO: 1567 - DNA, 15 bp, Artificial Sequence
  Description of Artificial Sequence: Synthetic oligonucleotide
cgtctaggaagtgag

SEQ ID NO: 1568 - DNA, 15 bp, Artificial Sequence
  Description of Artificial Sequence: Synthetic oligonucleotide
gcggttttgtggaat

SEQ ID NO: 1569 - DNA, 15 bp, Artificial Sequence
  Description of Artificial Sequence: Synthetic oligonucleotide
cctgactggttttcg

SEQ ID NO: 1570 - DNA, 15 bp, Artificial Sequence
  Description of Artificial Sequence: Synthetic oligonucleotide
ccccgtctgggaagt

SEQ ID NO: 1571 - DNA, 15 bp, Artificial Sequence
  Description of Artificial Sequence: Synthetic oligonucleotide
tactgccgtgatctc

SEQ ID NO: 1572 - DNA, 15 bp, Artificial Sequence
  Description of Artificial Sequence: Synthetic oligonucleotide
cgaatagaaaagggg

SEQ ID NO: 1573 - DNA, 15 bp, Artificial Sequence
  Description of Artificial Sequence: Synthetic oligonucleotide
gggagacttttcatt

SEQ ID NO: 1574 - DNA, 15 bp, Artificial Sequence
  Description of Artificial Sequence: Synthetic oligonucleotide
tgcccggccgccacc

SEQ ID NO: 1575 - DNA, 15 bp, Artificial Sequence
  Description of Artificial Sequence: Synthetic oligonucleotide
atggattaagggcgg

SEQ ID NO: 1576 - DNA, 15 bp, Artificial Sequence
  Description of Artificial Sequence: Synthetic oligonucleotide
tacggtctccctctg

SEQ ID NO: 1577 - DNA, 15 bp, Artificial Sequence
  Description of Artificial Sequence: Synthetic oligonucleotide
cccgcccggccagcc

SEQ ID NO: 1578 - DNA, 15 bp, Artificial Sequence
  Description of Artificial Sequence: Synthetic oligonucleotide
ggagacttcattttg

SEQ ID NO: 1579 - DNA, 15 bp, Artificial Sequence
  Description of Artificial Sequence: Synthetic oligonucleotide
tctacggtctccctc

SEQ ID NO: 1580 - DNA, 15 bp, Artificial Sequence
  Description of Artificial Sequence: Synthetic oligonucleotide
attctcctgcctcag

SEQ ID NO: 1581 - DNA, 15 bp, Artificial Sequence
  Description of Artificial Sequence: Synthetic oligonucleotide
cggccgcccatcgtc

SEQ ID NO: 1582 - DNA, 15 bp, Artificial Sequence
  Description of Artificial Sequence: Synthetic oligonucleotide
agctggactgtactg

SEQ ID NO: 1583 - DNA, 15 bp, Artificial Sequence
  Description of Artificial Sequence: Synthetic oligonucleotide
ccactattgtcctat

SEQ ID NO: 1584 - DNA, 15 bp, Artificial Sequence
  Description of Artificial Sequence: Synthetic oligonucleotide
atgctgttaatctat

SEQ ID NO: 1585 - DNA, 15 bp, Artificial Sequence
  Description of Artificial Sequence: Synthetic oligonucleotide
gcctcagcctgccga

SEQ ID NO: 1586 - DNA, 15 bp, Artificial Sequence
  Description of Artificial Sequence: Synthetic oligonucleotide
ggggtttcgctgtgt

SEQ ID NO: 1587 - DNA, 15 bp, Artificial Sequence
  Description of Artificial Sequence: Synthetic oligonucleotide
accaccccgtctggg

SEQ ID NO: 1588 - DNA, 15 bp, Artificial Sequence
  Description of Artificial Sequence: Synthetic oligonucleotide
tctgcctaggaaaac

SEQ ID NO: 1589 - DNA, 15 bp, Artificial Sequence
  Description of Artificial Sequence: Synthetic oligonucleotide
cggttttgtggaata

SEQ ID NO: 1590 - DNA, 15 bp, Artificial Sequence
  Description of Artificial Sequence: Synthetic oligonucleotide
gacggagtctcgctc

SEQ ID NO: 1591 - DNA, 15 bp, Artificial Sequence
  Description of Artificial Sequence: Synthetic oligonucleotide
ccgccatcccgtcta

SEQ ID NO: 1592 - DNA, 15 bp, Artificial Sequence
  Description of Artificial Sequence: Synthetic oligonucleotide
gagccggattgcagc

SEQ ID NO: 1593 - DNA, 15 bp, Artificial Sequence
  Description of Artificial Sequence: Synthetic oligonucleotide
gcggtgcaagatgtg

SEQ ID NO: 1594 - DNA, 15 bp, Artificial Sequence
  Description of Artificial Sequence: Synthetic oligonucleotide
cataggagactccat

SEQ ID NO: 1595 - DNA, 15 bp, Artificial Sequence
  Description of Artificial Sequence: Synthetic oligonucleotide
cctccacctcccagc

SEQ ID NO: 1596 - DNA, 15 bp, Artificial Sequence
  Description of Artificial Sequence: Synthetic oligonucleotide
aaagagccggattgc

SEQ ID NO: 1597 - DNA, 15 bp, Artificial Sequence
  Description of Artificial Sequence: Synthetic oligonucleotide
gaacgggccaggatg

SEQ ID NO: 1598 - DNA, 15 bp, Artificial Sequence
  Description of Artificial Sequence: Synthetic oligonucleotide
ggtgggggggtcagc

SEQ ID NO: 1599 - DNA, 15 bp, Artificial Sequence
  Description of Artificial Sequence: Synthetic oligonucleotide
gccccgtctgggatg

SEQ ID NO: 1600 - DNA, 15 bp, Artificial Sequence
  Description of Artificial Sequence: Synthetic oligonucleotide
cgaggtgccgggatt

SEQ ID NO: 1601 - DNA, 15 bp, Artificial Sequence
  Description of Artificial Sequence: Synthetic oligonucleotide
tctgtgtggatagaa

SEQ ID NO: 1602 - DNA, 15 bp, Artificial Sequence
  Description of Artificial Sequence: Synthetic oligonucleotide
ctcgctgcaacctcc

SEQ ID NO: 1603 - DNA, 15 bp, Artificial Sequence
  Description of Artificial Sequence: Synthetic oligonucleotide
gattctcctgcctca

SEQ ID NO: 1604 - DNA, 15 bp, Artificial Sequence
  Description of Artificial Sequence: Synthetic oligonucleotide
ctattgtcctatgac

SEQ ID NO: 1605 - DNA, 15 bp, Artificial Sequence
  Description of Artificial Sequence: Synthetic oligonucleotide
ctccacggtctccct

SEQ ID NO: 1606 - DNA, 15 bp, Artificial Sequence
  Description of Artificial Sequence: Synthetic oligonucleotide
gcagcatgctcgtta

SEQ ID NO: 1607 - DNA, 15 bp, Artificial Sequence
  Description of Artificial Sequence: Synthetic oligonucleotide
tccctctccctgtcc

SEQ ID NO: 1608 - DNA, 15 bp, Artificial Sequence
  Description of Artificial Sequence: Synthetic oligonucleotide
ctgtgctctctgaaa

SEQ ID NO: 1609 - DNA, 15 bp, Artificial Sequence
  Description of Artificial Sequence: Synthetic oligonucleotide
ccgagccgaagctgg

SEQ ID NO: 1610 - DNA, 15 bp, Artificial Sequence
  Description of Artificial Sequence: Synthetic oligonucleotide
actgtactgccgtga

SEQ ID NO: 1611 - DNA, 15 bp, Artificial Sequence
  Description of Artificial Sequence: Synthetic oligonucleotide
gagtgcagtggcgtg

SEQ ID NO: 1612 - DNA, 15 bp, Artificial Sequence
  Description of Artificial Sequence: Synthetic oligonucleotide
tgagaacgggccatg

SEQ ID NO: 1613 - DNA, 15 bp, Artificial Sequence
  Description of Artificial Sequence: Synthetic oligonucleotide
agtgaggagcccctc

SEQ ID NO: 1614 - DNA, 15 bp, Artificial Sequence
  Description of Artificial Sequence: Synthetic oligonucleotide
cggctcattggggat

SEQ ID NO: 1615 - DNA, 15 bp, Artificial Sequence
  Description of Artificial Sequence: Synthetic oligonucleotide
tggttttggtggaga

SEQ ID NO: 1616 - DNA, 15 bp, Artificial Sequence
  Description of Artificial Sequence: Synthetic oligonucleotide
caaatccccctctgc

SEQ ID NO: 1617 - DNA, 15 bp, Artificial Sequence
  Description of Artificial Sequence: Synthetic oligonucleotide
agggtcctctgccta

SEQ ID NO: 1618 - DNA, 15 bp, Artificial Sequence
  Description of Artificial Sequence: Synthetic oligonucleotide
cccctctgcgagaaa

SEQ ID NO: 1619 - DNA, 15 bp, Artificial Sequence
  Description of Artificial Sequence: Synthetic oligonucleotide
agtgattctcctgcc

SEQ ID NO: 1620 - DNA, 15 bp, Artificial Sequence
  Description of Artificial Sequence: Synthetic oligonucleotide
cacctctgccccgcc

SEQ ID NO: 1621 - DNA, 15 bp, Artificial Sequence
  Description of Artificial Sequence: Synthetic oligonucleotide
tgtgcccagcggctc

SEQ ID NO: 1622 - DNA, 15 bp, Artificial Sequence
  Description of Artificial Sequence: Synthetic oligonucleotide
cacaaacactgcgga

SEQ ID NO: 1623 - DNA, 15 bp, Artificial Sequence
  Description of Artificial Sequence: Synthetic oligonucleotide
caaatccccctctgt

SEQ ID NO: 1624 - DNA, 15 bp, Artificial Sequence
  Description of Artificial Sequence: Synthetic oligonucleotide
tgactggttttggtg

SEQ ID NO: 1625 - DNA, 15 bp, Artificial Sequence
  Description of Artificial Sequence: Synthetic oligonucleotide
ccgaggtgctgggat

SEQ ID NO: 1626 - DNA, 15 bp, Artificial Sequence
  Description of Artificial Sequence: Synthetic oligonucleotide
tgcctgattctcctg

SEQ ID NO: 1627 - DNA, 15 bp, Artificial Sequence
  Description of Artificial Sequence: Synthetic oligonucleotide
ccagctcctgaccgc

SEQ ID NO: 1628 - DNA, 15 bp, Artificial Sequence
  Description of Artificial Sequence: Synthetic oligonucleotide
gagacctttgttcac

SEQ ID NO: 1629 - DNA, 15 bp, Artificial Sequence
  Description of Artificial Sequence: Synthetic oligonucleotide
ctgggaggtgggggg

SEQ ID NO: 1630 - DNA, 15 bp, Artificial Sequence
  Description of Artificial Sequence: Synthetic oligonucleotide
ggagcgcctctgccc

SEQ ID NO: 1631 - DNA, 15 bp, Artificial Sequence
  Description of Artificial Sequence: Synthetic oligonucleotide
acacaaacactgcgg

SEQ ID NO: 1632 - DNA, 15 bp, Artificial Sequence
  Description of Artificial Sequence: Synthetic oligonucleotide
caagaattatcaata

SEQ ID NO: 1633 - DNA, 15 bp, Artificial Sequence
  Description of Artificial Sequence: Synthetic oligonucleotide
gccggattgcagcct

SEQ ID NO: 1634 - DNA, 15 bp, Artificial Sequence
  Description of Artificial Sequence: Synthetic oligonucleotide
acggagtctggttca

SEQ ID NO: 1635 - DNA, 15 bp, Artificial Sequence
  Description of Artificial Sequence: Synthetic oligonucleotide
caagtacccagggac

SEQ ID NO: 1636 - DNA, 15 bp, Artificial Sequence
  Description of Artificial Sequence: Synthetic oligonucleotide
ttgcccaggctggag

SEQ ID NO: 1637 - DNA, 15 bp, Artificial Sequence
  Description of Artificial Sequence: Synthetic oligonucleotide
ccgaggctggactgt

SEQ ID NO: 1638 - DNA, 15 bp, Artificial Sequence
  Description of Artificial Sequence: Synthetic oligonucleotide
ggctccagtgattct

SEQ ID NO: 1639 - DNA, 15 bp, Artificial Sequence
  Description of Artificial Sequence: Synthetic oligonucleotide
cctgactggtttttg

SEQ ID NO: 1640 - DNA, 15 bp, Artificial Sequence
  Description of Artificial Sequence: Synthetic oligonucleotide
attatcctatgaccc

SEQ ID NO: 1641 - DNA, 15 bp, Artificial Sequence
  Description of Artificial Sequence: Synthetic oligonucleotide
ggtgtgcccaacagc

SEQ ID NO: 1642 - DNA, 15 bp, Artificial Sequence
  Description of Artificial Sequence: Synthetic oligonucleotide
cagctcattgagaac

SEQ ID NO: 1643 - DNA, 15 bp, Artificial Sequence
  Description of Artificial Sequence: Synthetic oligonucleotide
caaagagccggattg

SEQ ID NO: 1644 - DNA, 15 bp, Artificial Sequence
  Description of Artificial Sequence: Synthetic oligonucleotide
ctctttccacggtct

SEQ ID NO: 1645 - DNA, 15 bp, Artificial Sequence
  Description of Artificial Sequence: Synthetic oligonucleotide
gccgcctgccttggc

SEQ ID NO: 1646 - DNA, 15 bp, Artificial Sequence
  Description of Artificial Sequence: Synthetic oligonucleotide
ctgtcccctctttcc

SEQ ID NO: 1647 - DNA, 15 bp, Artificial Sequence
  Description of Artificial Sequence: Synthetic oligonucleotide
gcctctgcccggccg

SEQ ID NO: 1648 - DNA, 15 bp, Artificial Sequence
  Description of Artificial Sequence: Synthetic oligonucleotide
actggtttttgtatt

SEQ ID NO: 1649 - DNA, 15 bp, Artificial Sequence
  Description of Artificial Sequence: Synthetic oligonucleotide
cccaaccctgtgctc

SEQ ID NO: 1650 - DNA, 15 bp, Artificial Sequence
  Description of Artificial Sequence: Synthetic oligonucleotide
tgttctgtactaaga

SEQ ID NO: 1651 - DNA, 15 bp, Artificial Sequence
  Description of Artificial Sequence: Synthetic oligonucleotide
ctgcccggccagccg

SEQ ID NO: 1652 - DNA, 15 bp, Artificial Sequence
  Description of Artificial Sequence: Synthetic oligonucleotide
cttacccccaacccc

SEQ ID NO: 1653 - DNA, 15 bp, Artificial Sequence
  Description of Artificial Sequence: Synthetic oligonucleotide
ccgggaggtgagggg

SEQ ID NO: 1654 - DNA, 15 bp, Artificial Sequence
  Description of Artificial Sequence: Synthetic oligonucleotide
aatagaaaggcggga

SEQ ID NO: 1655 - DNA, 15 bp, Artificial Sequence
  Description of Artificial Sequence: Synthetic oligonucleotide
ctgccttgggatgct

SEQ ID NO: 1656 - DNA, 15 bp, Artificial Sequence
  Description of Artificial Sequence: Synthetic oligonucleotide
aggagcccctctgcc

SEQ ID NO: 1657 - DNA, 15 bp, Artificial Sequence
  Description of Artificial Sequence: Synthetic oligonucleotide
atgtgaggagcccct

SEQ ID NO: 1658 - DNA, 15 bp, Artificial Sequence
  Description of Artificial Sequence: Synthetic oligonucleotide
ctgttgatctgtgac

SEQ ID NO: 1659 - DNA, 15 bp, Artificial Sequence
  Description of Artificial Sequence: Synthetic oligonucleotide
agtctcgttcactca

SEQ ID NO: 1660 - DNA, 15 bp, Artificial Sequence
  Description of Artificial Sequence: Synthetic oligonucleotide
tcccgaggtgccggg

SEQ ID NO: 1661 - DNA, 15 bp, Artificial Sequence
  Description of Artificial Sequence: Synthetic oligonucleotide
gtggagacggggttt

SEQ ID NO: 1662 - DNA, 15 bp, Artificial Sequence
  Description of Artificial Sequence: Synthetic oligonucleotide
ttttgtcgaatagaa

SEQ ID NO: 1663 - DNA, 15 bp, Artificial Sequence
  Description of Artificial Sequence: Synthetic oligonucleotide
gaattatcaataaaa

SEQ ID NO: 1664 - DNA, 15 bp, Artificial Sequence
  Description of Artificial Sequence: Synthetic oligonucleotide
atggttgccgtgtct

SEQ ID NO: 1665 - DNA, 15 bp, Artificial Sequence
  Description of Artificial Sequence: Synthetic oligonucleotide
ctctctccacggtct

SEQ ID NO: 1666 - DNA, 15 bp, Artificial Sequence
  Description of Artificial Sequence: Synthetic oligonucleotide
acggtactgctgcca

SEQ ID NO: 1667 - DNA, 15 bp, Artificial Sequence
  Description of Artificial Sequence: Synthetic oligonucleotide
cacggtctccctctg

SEQ ID NO: 1668 - DNA, 15 bp, Artificial Sequence
  Description of Artificial Sequence: Synthetic oligonucleotide
gtgttggccgggctg

SEQ ID NO: 1669 - DNA, 15 bp, Artificial Sequence
  Description of Artificial Sequence: Synthetic oligonucleotide
gtagaaagaagtaga

SEQ ID NO: 1670 - DNA, 15 bp, Artificial Sequence
  Description of Artificial Sequence: Synthetic oligonucleotide
tctccacggtctccc

SEQ ID NO: 1671 - DNA, 15 bp, Artificial Sequence
  Description of Artificial Sequence: Synthetic oligonucleotide
ccattttgttctgta

SEQ ID NO: 1672 - DNA, 15 bp, Artificial Sequence
  Description of Artificial Sequence: Synthetic oligonucleotide
acccaagaatgatca

SEQ ID NO: 1673 - DNA, 15 bp, Artificial Sequence
  Description of Artificial Sequence: Synthetic oligonucleotide
ctctccctctcccct

SEQ ID NO: 1674 - DNA, 15 bp, Artificial Sequence
  Description of Artificial Sequence: Synthetic oligonucleotide
agcctcggcctcccg

SEQ ID NO: 1675 - DNA, 15 bp, Artificial Sequence
  Description of Artificial Sequence: Synthetic oligonucleotide
catcgtctgggatgt

SEQ ID NO: 1676 - DNA, 15 bp, Artificial Sequence
  Description of Artificial Sequence: Synthetic oligonucleotide
cggccgccccgtctg

SEQ ID NO: 1677 - DNA, 15 bp, Artificial Sequence
  Description of Artificial Sequence: Synthetic oligonucleotide
aaacacccaagaatg

SEQ ID NO: 1678 - DNA, 15 bp, Artificial Sequence
  Description of Artificial Sequence: Synthetic oligonucleotide
tcccatgaccctgcc

SEQ ID NO: 1679 - DNA, 15 bp, Artificial Sequence
  Description of Artificial Sequence: Synthetic oligonucleotide
gccgccatcccgtct

SEQ ID NO: 1680 - DNA, 15 bp, Artificial Sequence
  Description of Artificial Sequence: Synthetic oligonucleotide
ttcacgtgtttatct

SEQ ID NO: 1681 - DNA, 15 bp, Artificial Sequence
  Description of Artificial Sequence: Synthetic oligonucleotide
atcccgtctaggaag

SEQ ID NO: 1682 - DNA, 15 bp, Artificial Sequence
  Description of Artificial Sequence: Synthetic oligonucleotide
ggcggttttgtggaa

SEQ ID NO: 1683 - DNA, 15 bp, Artificial Sequence
  Description of Artificial Sequence: Synthetic oligonucleotide
tcatgcggagccgaa

SEQ ID NO: 1684 - DNA, 15 bp, Artificial Sequence
  Description of Artificial Sequence: Synthetic oligonucleotide
gtcagccccccgccc

SEQ ID NO: 1685 - DNA, 15 bp, Artificial Sequence
  Description of Artificial Sequence: Synthetic oligonucleotide
tggttgccgggtctg

SEQ ID NO: 1686 - DNA, 15 bp, Artificial Sequence
  Description of Artificial Sequence: Synthetic oligonucleotide
ctgctgaccttctct

SEQ ID NO: 1687 - DNA, 15 bp, Artificial Sequence
  Description of Artificial Sequence: Synthetic oligonucleotide
ggctcgctacaacca

SEQ ID NO: 1688 - DNA, 15 bp, Artificial Sequence
  Description of Artificial Sequence: Synthetic oligonucleotide
tgagaaacacccaag

SEQ ID NO: 1689 - DNA, 15 bp, Artificial Sequence
  Description of Artificial Sequence: Synthetic oligonucleotide
gcacctctgccccgc

SEQ ID NO: 1690 - DNA, 15 bp, Artificial Sequence
  Description of Artificial Sequence: Synthetic oligonucleotide
tctcgctcactcagt

SEQ ID NO: 1691 - DNA, 15 bp, Artificial Sequence
  Description of Artificial Sequence: Synthetic oligonucleotide
cccggccgccacccc

SEQ ID NO: 1692 - DNA, 15 bp, Artificial Sequence
  Description of Artificial Sequence: Synthetic oligonucleotide
aatctcaagtaatca

SEQ ID NO: 1693 - DNA, 15 bp, Artificial Sequence
  Description of Artificial Sequence: Synthetic oligonucleotide
ggctcgctacaacct

SEQ ID NO: 1694 - DNA, 15 bp, Artificial Sequence
  Description of Artificial Sequence: Synthetic oligonucleotide
aggcacgcgccgcca

SEQ ID NO: 1695 - DNA, 15 bp, Artificial Sequence
  Description of Artificial Sequence: Synthetic oligonucleotide
ctgtactgctgccat

SEQ ID NO: 1696 - DNA, 15 bp, Artificial Sequence
  Description of Artificial Sequence: Synthetic oligonucleotide
ggcggtgcaagatgt

SEQ ID NO: 1697 - DNA, 15 bp, Artificial Sequence
  Description of Artificial Sequence: Synthetic oligonucleotide
ctactgggaagtgag

SEQ ID NO: 1698 - DNA, 15 bp, Artificial Sequence
  Description of Artificial Sequence: Synthetic oligonucleotide
gggttaaatggatta

SEQ ID NO: 1699 - DNA, 15 bp, Artificial Sequence
  Description of Artificial Sequence: Synthetic oligonucleotide
ctcggctcactgcaa

SEQ ID NO: 1700 - DNA, 15 bp, Artificial Sequence
  Description of Artificial Sequence: Synthetic oligonucleotide
ttttcgtattttttt

SEQ ID NO: 1701 - DNA, 15 bp, Artificial Sequence
  Description of Artificial Sequence: Synthetic oligonucleotide
ttgttcacttgttta

SEQ ID NO: 1702 - DNA, 15 bp, Artificial Sequence
  Description of Artificial Sequence: Synthetic oligonucleotide
caccgccccgtctgg

SEQ ID NO: 1703 - DNA, 15 bp, Artificial Sequence
  Description of Artificial Sequence: Synthetic oligonucleotide
tgccgagccaaagct

SEQ ID NO: 1704 - DNA, 15 bp, Artificial Sequence
  Description of Artificial Sequence: Synthetic oligonucleotide
tcgctcactcagtgc

SEQ ID NO: 1705 - DNA, 15 bp, Artificial Sequence
  Description of Artificial Sequence: Synthetic oligonucleotide
caataaaaaaaatta

SEQ ID NO: 1706 - DNA, 15 bp, Artificial Sequence
  Description of Artificial Sequence: Synthetic oligonucleotide
tcccctctttctacg

SEQ ID NO: 1707 - DNA, 15 bp, Artificial Sequence
  Description of Artificial Sequence: Synthetic oligonucleotide
atgaccctgccacat

SEQ ID NO: 1708 - DNA, 15 bp, Artificial Sequence
  Description of Artificial Sequence: Synthetic oligonucleotide
ccgccaccccgtctg

SEQ ID NO: 1709 - DNA, 15 bp, Artificial Sequence
  Description of Artificial Sequence: Synthetic oligonucleotide
gggctggtctccagc

SEQ ID NO: 1710 - DNA, 15 bp, Artificial Sequence
  Description of Artificial Sequence: Synthetic oligonucleotide
tgccaaatccccctc

SEQ ID NO: 1711 - DNA, 15 bp, Artificial Sequence
  Description of Artificial Sequence: Synthetic oligonucleotide
actccctaatctcaa

SEQ ID NO: 1712 - DNA, 15 bp, Artificial Sequence
  Description of Artificial Sequence: Synthetic oligonucleotide
cgcccatcgtctgag

SEQ ID NO: 1713 - DNA, 15 bp, Artificial Sequence
  Description of Artificial Sequence: Synthetic oligonucleotide
caccccgtctgggag

SEQ ID NO: 1714 - DNA, 15 bp, Artificial Sequence
  Description of Artificial Sequence: Synthetic oligonucleotide
agatagagaaatcgg

SEQ ID NO: 1715 - DNA, 15 bp, Artificial Sequence
  Description of Artificial Sequence: Synthetic oligonucleotide
agagaaatcggattg

SEQ ID NO: 1716 - DNA, 15 bp, Artificial Sequence
  Description of Artificial Sequence: Synthetic oligonucleotide
tccctccactattgt

SEQ ID NO: 1717 - DNA, 15 bp, Artificial Sequence
  Description of Artificial Sequence: Synthetic oligonucleotide
aattgagaaatcgga

SEQ ID NO: 1718 - DNA, 15 bp, Artificial Sequence
  Description of Artificial Sequence: Synthetic oligonucleotide
cccatgaccctgcca

SEQ ID NO: 1719 - DNA, 15 bp, Artificial Sequence
  Description of Artificial Sequence: Synthetic oligonucleotide
tgcaagatgtgcttt

SEQ ID NO: 1720 - DNA, 15 bp, Artificial Sequence
  Description of Artificial Sequence: Synthetic oligonucleotide
tacccagcgaccatt

SEQ ID NO: 1721 - DNA, 15 bp, Artificial Sequence
  Description of Artificial Sequence: Synthetic oligonucleotide
gttgctgtgtctgtg

SEQ ID NO: 1722 - DNA, 15 bp, Artificial Sequence
  Description of Artificial Sequence: Synthetic oligonucleotide
agggacctctgccta

SEQ ID NO: 1723 - DNA, 15 bp, Artificial Sequence
  Description of Artificial Sequence: Synthetic oligonucleotide
aggtgctgggattgc

SEQ ID NO: 1724 - DNA, 15 bp, Artificial Sequence
  Description of Artificial Sequence: Synthetic oligonucleotide
tctgggaggtggggg

SEQ ID NO: 1725 - DNA, 15 bp, Artificial Sequence
  Description of Artificial Sequence: Synthetic oligonucleotide
ctgggaggtgtgccc

SEQ ID NO: 1726 - DNA, 15 bp, Artificial Sequence
  Description of Artificial Sequence: Synthetic oligonucleotide
gttcacatgtttatc

SEQ ID NO: 1727 - DNA, 15 bp, Artificial Sequence
  Description of Artificial Sequence: Synthetic oligonucleotide
caaagtgccgagatt

SEQ ID NO: 1728 - DNA, 15 bp, Artificial Sequence
  Description of Artificial Sequence: Synthetic oligonucleotide
tctgagatgtgggga

SEQ ID NO: 1729 - DNA, 15 bp, Artificial Sequence
  Description of Artificial Sequence: Synthetic oligonucleotide
tgggattgcaggcac

SEQ ID NO: 1730 - DNA, 15 bp, Artificial Sequence
  Description of Artificial Sequence: Synthetic oligonucleotide
ctgccgtgatctcgg

SEQ ID NO: 1731 - DNA, 15 bp, Artificial Sequence
  Description of Artificial Sequence: Synthetic oligonucleotide
aatggcggttttgtg

SEQ ID NO: 1732 - DNA, 15 bp, Artificial Sequence
  Description of Artificial Sequence: Synthetic oligonucleotide
tgaccctgccaaatc

SEQ ID NO: 1733 - DNA, 15 bp, Artificial Sequence
  Description of Artificial Sequence: Synthetic oligonucleotide
tgatcaataaatact

SEQ ID NO: 1734 - DNA, 15 bp, Artificial Sequence
  Description of Artificial Sequence: Synthetic oligonucleotide
agtgccgagattgca

SEQ ID NO: 1735 - DNA, 15 bp, Artificial Sequence
  Description of Artificial Sequence: Synthetic oligonucleotide
aggccgcagggacct

SEQ ID NO: 1736 - DNA, 15 bp, Artificial Sequence
  Description of Artificial Sequence: Synthetic oligonucleotide
cctctgcctaggaaa

SEQ ID NO: 1737 - DNA, 15 bp, Artificial Sequence
  Description of Artificial Sequence: Synthetic oligonucleotide
gcccctctgcccggc

SEQ ID NO: 1738 - DNA, 15 bp, Artificial Sequence
  Description of Artificial Sequence: Synthetic oligonucleotide
tctgggaggtgaggg

SEQ ID NO: 1739 - DNA, 15 bp, Artificial Sequence
  Description of Artificial Sequence: Synthetic oligonucleotide
tcattttgttctgta

SEQ ID NO: 1740 - DNA, 15 bp, Artificial Sequence
  Description of Artificial Sequence: Synthetic oligonucleotide
cgcctcggcctcccg

SEQ ID NO: 1741 - DNA, 15 bp, Artificial Sequence
  Description of Artificial Sequence: Synthetic oligonucleotide
taagggcggtgcaag

SEQ ID NO: 1742 - DNA, 15 bp, Artificial Sequence
  Description of Artificial Sequence: Synthetic oligonucleotide
ccaagaatgatcaat

SEQ ID NO: 1743 - DNA, 15 bp, Artificial Sequence
  Description of Artificial Sequence: Synthetic oligonucleotide
gaccgggctggtctc

SEQ ID NO: 1744 - DNA, 15 bp, Artificial Sequence
  Description of Artificial Sequence: Synthetic oligonucleotide
gctgttaatctataa

SEQ ID NO: 1745 - DNA, 15 bp, Artificial Sequence
  Description of Artificial Sequence: Synthetic oligonucleotide
cttctgggaagtgag

SEQ ID NO: 1746 - DNA, 15 bp, Artificial Sequence
  Description of Artificial Sequence: Synthetic oligonucleotide
agaaaggcgggaaag

SEQ ID NO: 1747 - DNA, 15 bp, Artificial Sequence
  Description of Artificial Sequence: Synthetic oligonucleotide
agtctcgctcactca

SEQ ID NO: 1748 - DNA, 15 bp, Artificial Sequence
  Description of Artificial Sequence: Synthetic oligonucleotide
gtctaggaagtgagg

SEQ ID NO: 1749 - DNA, 15 bp, Artificial Sequence
  Description of Artificial Sequence: Synthetic oligonucleotide
tgggattgcagacgg

SEQ ID NO: 1750 - DNA, 15 bp, Artificial Sequence
  Description of Artificial Sequence: Synthetic oligonucleotide
agagtcatcaccact

SEQ ID NO: 1751 - DNA, 15 bp, Artificial Sequence
  Description of Artificial Sequence: Synthetic oligonucleotide
gatgctgttgatctg

SEQ ID NO: 1752 - DNA, 15 bp, Artificial Sequence
  Description of Artificial Sequence: Synthetic oligonucleotide
ccccgccgccccgtc

SEQ ID NO: 1753 - DNA, 15 bp, Artificial Sequence
  Description of Artificial Sequence: Synthetic oligonucleotide
gggccatgatgacga

SEQ ID NO: 1754 - DNA, 15 bp, Artificial Sequence
  Description of Artificial Sequence: Synthetic oligonucleotide
aagctggactgtact

SEQ ID NO: 1755 - DNA, 15 bp, Artificial Sequence
  Description of Artificial Sequence: Synthetic oligonucleotide
gcagacggagtctcg

SEQ ID NO: 1756 - DNA, 15 bp, Artificial Sequence
  Description of Artificial Sequence: Synthetic oligonucleotide
tctgcccggccgcca

SEQ ID NO: 1757 - DNA, 15 bp, Artificial Sequence
  Description of Artificial Sequence: Synthetic oligonucleotide
tctgcccggccgccc

SEQ ID NO: 1758 - DNA, 15 bp, Artificial Sequence
  Description of Artificial Sequence: Synthetic oligonucleotide
ggatgtgaggagccc

SEQ ID NO: 1759 - DNA, 15 bp, Artificial Sequence
  Description of Artificial Sequence: Synthetic oligonucleotide
gggaagtgaggagcg

SEQ ID NO: 1760 - DNA, 15 bp, Artificial Sequence
  Description of Artificial Sequence: Synthetic oligonucleotide
gggaagtgaggagcc

SEQ ID NO: 1761 - DNA, 15 bp, Artificial Sequence
  Description of Artificial Sequence: Synthetic oligonucleotide
tccacctcccagccg

SEQ ID NO: 1762 - DNA, 15 bp, Artificial Sequence
  Description of Artificial Sequence: Synthetic oligonucleotide
gtggggaaaagatag

SEQ ID NO: 1763 - DNA, 15 bp, Artificial Sequence
  Description of Artificial Sequence: Synthetic oligonucleotide
ctaagattgcagcct

SEQ ID NO: 1764 - DNA, 15 bp, Artificial Sequence
  Description of Artificial Sequence: Synthetic oligonucleotide
tgaaggcagcatgct

SEQ ID NO: 1765 - DNA, 15 bp, Artificial Sequence
  Description of Artificial Sequence: Synthetic oligonucleotide
gctggactgtactgc

SEQ ID NO: 1766 - DNA, 15 bp, Artificial Sequence
  Description of Artificial Sequence: Synthetic oligonucleotide
cactgcggaaggccg

SEQ ID NO: 1767 - DNA, 15 bp, Artificial Sequence
  Description of Artificial Sequence: Synthetic oligonucleotide
gaggagcgcctcttc

SEQ ID NO: 1768 - DNA, 15 bp, Artificial Sequence
  Description of Artificial Sequence: Synthetic oligonucleotide
tcgaaaagaaaaggg

SEQ ID NO: 1769 - DNA, 15 bp, Artificial Sequence
  Description of Artificial Sequence: Synthetic oligonucleotide
tttgttaaacagatg

SEQ ID NO: 1770 - DNA, 15 bp, Artificial Sequence
  Description of Artificial Sequence: Synthetic oligonucleotide
ctgactggttttggt

SEQ ID NO: 1771 - DNA, 15 bp, Artificial Sequence
  Description of Artificial Sequence: Synthetic oligonucleotide
ttgcaggcacgcgcc

SEQ ID NO: 1772 - DNA, 15 bp, Artificial Sequence
  Description of Artificial Sequence: Synthetic oligonucleotide
tctgttgccgaggct

SEQ ID NO: 1773 - DNA, 15 bp, Artificial Sequence
  Description of Artificial Sequence: Synthetic oligonucleotide
agagagatcagattg

SEQ ID NO: 1774 - DNA, 15 bp, Artificial Sequence
  Description of Artificial Sequence: Synthetic oligonucleotide
ctcggcctcccgagg

SEQ ID NO: 1775 - DNA, 15 bp, Artificial Sequence
  Description of Artificial Sequence: Synthetic oligonucleotide
tggcgtgatctcggc

SEQ ID NO: 1776 - DNA, 15 bp, Artificial Sequence
  Description of Artificial Sequence: Synthetic oligonucleotide
gcctccgcccggccg

SEQ ID NO: 1777 - DNA, 15 bp, Artificial Sequence
  Description of Artificial Sequence: Synthetic oligonucleotide
tctccctctccctct

SEQ ID NO: 1778 - DNA, 15 bp, Artificial Sequence
  Description of Artificial Sequence: Synthetic oligonucleotide
tcagggttaaatgga

SEQ ID NO: 1779 - DNA, 15 bp, Artificial Sequence
  Description of Artificial Sequence: Synthetic oligonucleotide
ctgtgagaaacaccc

SEQ ID NO: 1780 - DNA, 15 bp, Artificial Sequence
  Description of Artificial Sequence: Synthetic oligonucleotide
ccgagtgcctgcgat

SEQ ID NO: 1781 - DNA, 15 bp, Artificial Sequence
  Description of Artificial Sequence: Synthetic oligonucleotide
ccctccactattgtc

SEQ ID NO: 1782 - DNA, 15 bp, Artificial Sequence
  Description of Artificial Sequence: Synthetic oligonucleotide
cctctcccctctttc

SEQ ID NO: 1783 - DNA, 15 bp, Artificial Sequence
  Description of Artificial Sequence: Synthetic oligonucleotide
caatggcggctttgt

SEQ ID NO: 1784 - DNA, 15 bp, Artificial Sequence
  Description of Artificial Sequence: Synthetic oligonucleotide
cgcctctgcccggcc

SEQ ID NO: 1785 - DNA, 15 bp, Artificial Sequence
  Description of Artificial Sequence: Synthetic oligonucleotide
gaaacatgtgctgtg

SEQ ID NO: 1786 - DNA, 15 bp, Artificial Sequence
  Description of Artificial Sequence: Synthetic oligonucleotide
cccccaaccctgtgc

SEQ ID NO: 1787 - DNA, 15 bp, Artificial Sequence
  Description of Artificial Sequence: Synthetic oligonucleotide
gagtctcgctcactc

SEQ ID NO: 1788 - DNA, 15 bp, Artificial Sequence
  Description of Artificial Sequence: Synthetic oligonucleotide
tggtggagacggggt

SEQ ID NO: 1789 - DNA, 15 bp, Artificial Sequence
  Description of Artificial Sequence: Synthetic oligonucleotide
ggtctccctctgttg

SEQ ID NO: 1790 - DNA, 15 bp, Artificial Sequence
  Description of Artificial Sequence: Synthetic oligonucleotide
aaacactgcggaagg

SEQ ID NO: 1791 - DNA, 15 bp, Artificial Sequence
  Description of Artificial Sequence: Synthetic oligonucleotide
ggccgccatcccgtc

SEQ ID NO: 1792 - DNA, 15 bp, Artificial Sequence
  Description of Artificial Sequence: Synthetic oligonucleotide
cagacggagtctcgt

SEQ ID NO: 1793 - DNA, 15 bp, Artificial Sequence
  Description of Artificial Sequence: Synthetic oligonucleotide
gctcattggggatgg

SEQ ID NO: 1794 - DNA, 15 bp, Artificial Sequence
  Description of Artificial Sequence: Synthetic oligonucleotide
catcaccactcccta

SEQ ID NO: 1795 - DNA, 15 bp, Artificial Sequence
  Description of Artificial Sequence: Synthetic oligonucleotide
tctccctctcccctc

SEQ ID NO: 1796 - DNA, 15 bp, Artificial Sequence
  Description of Artificial Sequence: Synthetic oligonucleotide
cagacggagtctcgc

SEQ ID NO: 1797 - DNA, 15 bp, Artificial Sequence
  Description of Artificial Sequence: Synthetic oligonucleotide
aagggtggggaaaaa

SEQ ID NO: 1798 - DNA, 15 bp, Artificial Sequence
  Description of Artificial Sequence: Synthetic oligonucleotide
ttctgggaagtgagg

SEQ ID NO: 1799 - DNA, 15 bp, Artificial Sequence
  Description of Artificial Sequence: Synthetic oligonucleotide
cctgccacatccccc

SEQ ID NO: 1800 - DNA, 15 bp, Artificial Sequence
  Description of Artificial Sequence: Synthetic oligonucleotide
ctgcccagtctggga

SEQ ID NO: 1801 - DNA, 15 bp, Artificial Sequence
  Description of Artificial Sequence: Synthetic oligonucleotide
accttacccccaacc

SEQ ID NO: 1802 - DNA, 15 bp, Artificial Sequence
  Description of Artificial Sequence: Synthetic oligonucleotide
cgccatcccgtctgg

SEQ ID NO: 1803 - DNA, 15 bp, Artificial Sequence
  Description of Artificial Sequence: Synthetic oligonucleotide
ctctgcccggccgcc

SEQ ID NO: 1804 - DNA, 15 bp, Artificial Sequence
  Description of Artificial Sequence: Synthetic oligonucleotide
aggaggtgggggggt

SEQ ID NO: 1805 - DNA, 15 bp, Artificial Sequence
  Description of Artificial Sequence: Synthetic oligonucleotide
ctcccgaggtgccgg

SEQ ID NO: 1806 - DNA, 15 bp, Artificial Sequence
  Description of Artificial Sequence: Synthetic oligonucleotide
cgaagctggactgta

SEQ ID NO: 1807 - DNA, 15 bp, Artificial Sequence
  Description of Artificial Sequence: Synthetic oligonucleotide
gttggccgggctggt

SEQ ID NO: 1808 - DNA, 15 bp, Artificial Sequence
  Description of Artificial Sequence: Synthetic oligonucleotide
tagaaaagggggaaa

SEQ ID NO: 1809 - DNA, 15 bp, Artificial Sequence
  Description of Artificial Sequence: Synthetic oligonucleotide
ggctggagtgcagtg

SEQ ID NO: 1810 - DNA, 15 bp, Artificial Sequence
  Description of Artificial Sequence: Synthetic oligonucleotide
ccctgcctcgggctc

SEQ ID NO: 1811 - DNA, 15 bp, Artificial Sequence
  Description of Artificial Sequence: Synthetic oligonucleotide
gtctgggatgtgggg

SEQ ID NO: 1812 - DNA, 15 bp, Artificial Sequence
  Description of Artificial Sequence: Synthetic oligonucleotide
ctgtgtcaactcagg

SEQ ID NO: 1813 - DNA, 15 bp, Artificial Sequence
  Description of Artificial Sequence: Synthetic oligonucleotide
gccgtgttggccggg

SEQ ID NO: 1814 - DNA, 15 bp, Artificial Sequence
  Description of Artificial Sequence: Synthetic oligonucleotide
cactattatcctatg

SEQ ID NO: 1815 - DNA, 15 bp, Artificial Sequence
  Description of Artificial Sequence: Synthetic oligonucleotide
cccctctccgagaaa

SEQ ID NO: 1816 - DNA, 15 bp, Artificial Sequence
  Description of Artificial Sequence: Synthetic oligonucleotide
cggctcgctacaacc

SEQ ID NO: 1817 - DNA, 15 bp, Artificial Sequence
  Description of Artificial Sequence: Synthetic oligonucleotide
gtctgggatgtgagg

SEQ ID NO: 1818 - DNA, 15 bp, Artificial Sequence
  Description of Artificial Sequence: Synthetic oligonucleotide
gacatgggagacttt

SEQ ID NO: 1819 - DNA, 15 bp, Artificial Sequence
  Description of Artificial Sequence: Synthetic oligonucleotide
cccctctttctacgg

SEQ ID NO: 1820 - DNA, 15 bp, Artificial Sequence
  Description of Artificial Sequence: Synthetic oligonucleotide
gaaggccgcagggac

SEQ ID NO: 1821 - DNA, 15 bp, Artificial Sequence
  Description of Artificial Sequence: Synthetic oligonucleotide
aggatgacaatggcg

SEQ ID NO: 1822 - DNA, 15 bp, Artificial Sequence
  Description of Artificial Sequence: Synthetic oligonucleotide
gacatgggagacttc

SEQ ID NO: 1823 - DNA, 15 bp, Artificial Sequence
  Description of Artificial Sequence: Synthetic oligonucleotide
ccaccaccccgtctg

SEQ ID NO: 1824 - DNA, 15 bp, Artificial Sequence
  Description of Artificial Sequence: Synthetic oligonucleotide
gggaggtgtgcccaa

SEQ ID NO: 1825 - DNA, 15 bp, Artificial Sequence
  Description of Artificial Sequence: Synthetic oligonucleotide
gcccgcctcggcctc

SEQ ID NO: 1826 - DNA, 15 bp, Artificial Sequence
  Description of Artificial Sequence: Synthetic oligonucleotide
gggaggtgtgcccag

SEQ ID NO: 1827 - DNA, 15 bp, Artificial Sequence
  Description of Artificial Sequence: Synthetic oligonucleotide
atctgtgaccttacc

SEQ ID NO: 1828 - DNA, 15 bp, Artificial Sequence
  Description of Artificial Sequence: Synthetic oligonucleotide
tataaccttaccccc

SEQ ID NO: 1829 - DNA, 15 bp, Artificial Sequence
  Description of Artificial Sequence: Synthetic oligonucleotide
catgctcgttaagag

SEQ ID NO: 1830 - DNA, 15 bp, Artificial Sequence
  Description of Artificial Sequence: Synthetic oligonucleotide
gcgtctctgcctggc

SEQ ID NO: 1831 - DNA, 15 bp, Artificial Sequence
  Description of Artificial Sequence: Synthetic oligonucleotide
gggtctgtgtggata

SEQ ID NO: 1832 - DNA, 15 bp, Artificial Sequence
  Description of Artificial Sequence: Synthetic oligonucleotide
cgtccgggaggtgag

SEQ ID NO: 1833 - DNA, 15 bp, Artificial Sequence
  Description of Artificial Sequence: Synthetic oligonucleotide
acggtctccctctgt

SEQ ID NO: 1834 - DNA, 15 bp, Artificial Sequence
  Description of Artificial Sequence: Synthetic oligonucleotide
atggtgcccaggctg

SEQ ID NO: 1835 - DNA, 15 bp, Artificial Sequence
  Description of Artificial Sequence: Synthetic oligonucleotide
tgggaggtgtaccca

SEQ ID NO: 1836 - DNA, 15 bp, Artificial Sequence
  Description of Artificial Sequence: Synthetic oligonucleotide
tctgcccggccagcc

SEQ ID NO: 1837 - DNA, 15 bp, Artificial Sequence
  Description of Artificial Sequence: Synthetic oligonucleotide
ccctgtcccctcttt

SEQ ID NO: 1838 - DNA, 15 bp, Artificial Sequence
  Description of Artificial Sequence: Synthetic oligonucleotide
tgaccttacccccaa

SEQ ID NO: 1839 - DNA, 15 bp, Artificial Sequence
  Description of Artificial Sequence: Synthetic oligonucleotide
acggtctccctctga

SEQ ID NO: 1840 - DNA, 15 bp, Artificial Sequence
  Description of Artificial Sequence: Synthetic oligonucleotide
cctttgttcacgtgt

SEQ ID NO: 1841 - DNA, 15 bp, Artificial Sequence
  Description of Artificial Sequence: Synthetic oligonucleotide
tgtactgctgccatc

SEQ ID NO: 1842 - DNA, 15 bp, Artificial Sequence
  Description of Artificial Sequence: Synthetic oligonucleotide
tgggattgcaggcgc

SEQ ID NO: 1843 - DNA, 15 bp, Artificial Sequence
  Description of Artificial Sequence: Synthetic oligonucleotide
cccctctgtgagaaa

SEQ ID NO: 1844 - DNA, 15 bp, Artificial Sequence
  Description of Artificial Sequence: Synthetic oligonucleotide
tttggtggagacggg

SEQ ID NO: 1845 - DNA, 15 bp, Artificial Sequence
  Description of Artificial Sequence: Synthetic oligonucleotide
aacctccctgcctcg

SEQ ID NO: 1846 - DNA, 15 bp, Artificial Sequence
  Description of Artificial Sequence: Synthetic oligonucleotide
cctgactggttttgg

SEQ ID NO: 1847 - DNA, 15 bp, Artificial Sequence
  Description of Artificial Sequence: Synthetic oligonucleotide
ccacggtctccctct

SEQ ID NO: 1848 - DNA, 15 bp, Artificial Sequence
  Description of Artificial Sequence: Synthetic oligonucleotide
gcggctcattgggga

SEQ ID NO: 1849 - DNA, 15 bp, Artificial Sequence
  Description of Artificial Sequence: Synthetic oligonucleotide
acttcattttgttct

SEQ ID NO: 1850 - DNA, 15 bp, Artificial Sequence
  Description of Artificial Sequence: Synthetic oligonucleotide
cctccctgcctcggg

SEQ ID NO: 1851 - DNA, 15 bp, Artificial Sequence
  Description of Artificial Sequence: Synthetic oligonucleotide
gggattgcaggcacg

SEQ ID NO: 1852 - DNA, 15 bp, Artificial Sequence
  Description of Artificial Sequence: Synthetic oligonucleotide
tgtcctatgaccctg

SEQ ID NO: 1853 - DNA, 15 bp, Artificial Sequence
  Description of Artificial Sequence: Synthetic oligonucleotide
gcccagtctgggaag

SEQ ID NO: 1854 - DNA, 15 bp, Artificial Sequence
  Description of Artificial Sequence: Synthetic oligonucleotide
cgtctgggaggtggg

SEQ ID NO: 1855 - DNA, 15 bp, Artificial Sequence
  Description of Artificial Sequence: Synthetic oligonucleotide
tcttaagtacccagg

SEQ ID NO: 1856 - DNA, 15 bp, Artificial Sequence
  Description of Artificial Sequence: Synthetic oligonucleotide
agaaagaggtagaca

SEQ ID NO: 1857 - DNA, 15 bp, Artificial Sequence
  Description of Artificial Sequence: Synthetic oligonucleotide
tgttgaccgggctgg

SEQ ID NO: 1858 - DNA, 15 bp, Artificial Sequence
  Description of Artificial Sequence: Synthetic oligonucleotide
cagccgcctgccttg

SEQ ID NO: 1859 - DNA, 15 bp, Artificial Sequence
  Description of Artificial Sequence: Synthetic oligonucleotide
ataaatactaaaaaa

SEQ ID NO: 1860 - DNA, 15 bp, Artificial Sequence
  Description of Artificial Sequence: Synthetic oligonucleotide
ccaaccccgtgctct

SEQ ID NO: 1861 - DNA, 15 bp, Artificial Sequence
  Description of Artificial Sequence: Synthetic oligonucleotide
gatctgcccgcctcg

SEQ ID NO: 1862 - DNA, 15 bp, Artificial Sequence
  Description of Artificial Sequence: Synthetic oligonucleotide
ttgttcacgtgttta

SEQ ID NO: 1863 - DNA, 15 bp, Artificial Sequence
  Description of Artificial Sequence: Synthetic oligonucleotide
tgcggaaggccgcag

SEQ ID NO: 1864 - DNA, 15 bp, Artificial Sequence
  Description of Artificial Sequence: Synthetic oligonucleotide
ggcggttttgtcgaa

SEQ ID NO: 1865 - DNA, 15 bp, Artificial Sequence
  Description of Artificial Sequence: Synthetic oligonucleotide
tcagattgttactgt

SEQ ID NO: 1866 - DNA, 15 bp, Artificial Sequence
  Description of Artificial Sequence: Synthetic oligonucleotide
tgcccggccagccgc

SEQ ID NO: 1867 - DNA, 15 bp, Artificial Sequence
  Description of Artificial Sequence: Synthetic oligonucleotide
actggttttggtgga

SEQ ID NO: 1868 - DNA, 15 bp, Artificial Sequence
  Description of Artificial Sequence: Synthetic oligonucleotide
tgccttggcctccca

SEQ ID NO: 1869 - DNA, 15 bp, Artificial Sequence
  Description of Artificial Sequence: Synthetic oligonucleotide
gaatgatcaataaaa

SEQ ID NO: 1870 - DNA, 15 bp, Artificial Sequence
  Description of Artificial Sequence: Synthetic oligonucleotide
cagagacctttgttc

SEQ ID NO: 1871 - DNA, 15 bp, Artificial Sequence
  Description of Artificial Sequence: Synthetic oligonucleotide
gaaagagagatcaga

SEQ ID NO: 1872 - DNA, 15 bp, Artificial Sequence
  Description of Artificial Sequence: Synthetic oligonucleotide
gaatgatcaataaat

SEQ ID NO: 1873 - DNA, 15 bp, Artificial Sequence
  Description of Artificial Sequence: Synthetic oligonucleotide
aattatcaataaaaa

SEQ ID NO: 1874 - DNA, 15 bp, Artificial Sequence
  Description of Artificial Sequence: Synthetic oligonucleotide
ccgggattgcagacg

SEQ ID NO: 1875 - DNA, 15 bp, Artificial Sequence
  Description of Artificial Sequence: Synthetic oligonucleotide
ggttgccgtgtctgt

SEQ ID NO: 1876 - DNA, 15 bp, Artificial Sequence
  Description of Artificial Sequence: Synthetic oligonucleotide
agacggagtctcgtt

SEQ ID NO: 1877 - DNA, 15 bp, Artificial Sequence
  Description of Artificial Sequence: Synthetic oligonucleotide
tgcttgaaggcagca

SEQ ID NO: 1878 - DNA, 15 bp, Artificial Sequence
  Description of Artificial Sequence: Synthetic oligonucleotide
atagaaaagggggaa

SEQ ID NO: 1879 - DNA, 15 bp, Artificial Sequence
  Description of Artificial Sequence: Synthetic oligonucleotide
aaagaggtagacatg

SEQ ID NO: 1880 - DNA, 15 bp, Artificial Sequence
  Description of Artificial Sequence: Synthetic oligonucleotide
gttcacttgtttatc

SEQ ID NO: 1881 - DNA, 15 bp, Artificial Sequence
  Description of Artificial Sequence: Synthetic oligonucleotide
gtgtgcccagcggct

SEQ ID NO: 1882 - DNA, 15 bp, Artificial Sequence
  Description of Artificial Sequence: Synthetic oligonucleotide
tcgccgtgttggccg

SEQ ID NO: 1883 - DNA, 15 bp, Artificial Sequence
  Description of Artificial Sequence: Synthetic oligonucleotide
tcctgcctcggcctg

SEQ ID NO: 1884 - DNA, 15 bp, Artificial Sequence
  Description of Artificial Sequence: Synthetic oligonucleotide
cgttcactcagtgct

SEQ ID NO: 1885 - DNA, 15 bp, Artificial Sequence
  Description of Artificial Sequence: Synthetic oligonucleotide
gggtcagccccccgc

SEQ ID NO: 1886 - DNA, 15 bp, Artificial Sequence
  Description of Artificial Sequence: Synthetic oligonucleotide
ttgtattttttggtg

SEQ ID NO: 1887 - DNA, 15 bp, Artificial Sequence
  Description of Artificial Sequence: Synthetic oligonucleotide
tgccgagtgcctggg

SEQ ID NO: 1888 - DNA, 15 bp, Artificial Sequence
  Description of Artificial Sequence: Synthetic oligonucleotide
ttggggatgggccat

SEQ ID NO: 1889 - DNA, 15 bp, Artificial Sequence
  Description of Artificial Sequence: Synthetic oligonucleotide
aaaaaattaaaaaaa

SEQ ID NO: 1890 - DNA, 15 bp, Artificial Sequence
  Description of Artificial Sequence: Synthetic oligonucleotide
ttttgtggaatagaa

SEQ ID NO: 1891 - DNA, 15 bp, Artificial Sequence
  Description of Artificial Sequence: Synthetic oligonucleotide
ggggggtcagccccc

SEQ ID NO: 1892 - DNA, 15 bp, Artificial Sequence
  Description of Artificial Sequence: Synthetic oligonucleotide
cctgcctcggcctgc

SEQ ID NO: 1893 - DNA, 15 bp, Artificial Sequence
  Description of Artificial Sequence: Synthetic oligonucleotide
atgccgagccaaagc

SEQ ID NO: 1894 - DNA, 15 bp, Artificial Sequence
  Description of Artificial Sequence: Synthetic oligonucleotide
cctgaccgcgagtga

SEQ ID NO: 1895 - DNA, 15 bp, Artificial Sequence
  Description of Artificial Sequence: Synthetic oligonucleotide
ctataaccttacccc

SEQ ID NO: 1896 - DNA, 15 bp, Artificial Sequence
  Description of Artificial Sequence: Synthetic oligonucleotide
aatccccctctccga

SEQ ID NO: 1897 - DNA, 15 bp, Artificial Sequence
  Description of Artificial Sequence: Synthetic oligonucleotide
cctcccgaggtgccg

SEQ ID NO: 1898 - DNA, 15 bp, Artificial Sequence
  Description of Artificial Sequence: Synthetic oligonucleotide
caaagctggacggta

SEQ ID NO: 1899 - DNA, 15 bp, Artificial Sequence
  Description of Artificial Sequence: Synthetic oligonucleotide
gggagcacctctgcc

SEQ ID NO: 1900 - DNA, 15 bp, Artificial Sequence
  Description of Artificial Sequence: Synthetic oligonucleotide
ccacgcctgactggt

SEQ ID NO: 1901 - DNA, 15 bp, Artificial Sequence
  Description of Artificial Sequence: Synthetic oligonucleotide
tggactgtactgccg

SEQ ID NO: 1902 - DNA, 15 bp, Artificial Sequence
  Description of Artificial Sequence: Synthetic oligonucleotide
tacaaccacctccca

SEQ ID NO: 1903 - DNA, 15 bp, Artificial Sequence
  Description of Artificial Sequence: Synthetic oligonucleotide
gttttgtcgaaaaga

SEQ ID NO: 1904 - DNA, 15 bp, Artificial Sequence
  Description of Artificial Sequence: Synthetic oligonucleotide
tctgtgtagaaagag

SEQ ID NO: 1905 - DNA, 15 bp, Artificial Sequence
  Description of Artificial Sequence: Synthetic oligonucleotide
atagagaaatcggat

SEQ ID NO: 1906 - DNA, 15 bp, Artificial Sequence
  Description of Artificial Sequence: Synthetic oligonucleotide
tctgtgtagaaagaa

SEQ ID NO: 1907 - DNA, 15 bp, Artificial Sequence
  Description of Artificial Sequence: Synthetic oligonucleotide
gagcgcctctgcccg

SEQ ID NO: 1908 - DNA, 15 bp, Artificial Sequence
  Description of Artificial Sequence: Synthetic oligonucleotide
acctttgttcacttg

SEQ ID NO: 1909 - DNA, 15 bp, Artificial Sequence
  Description of Artificial Sequence: Synthetic oligonucleotide
gagcgcctctgcccc

SEQ ID NO: 1910 - DNA, 15 bp, Artificial Sequence
  Description of Artificial Sequence: Synthetic oligonucleotide
atctcggctcgctac

SEQ ID NO: 1911 - DNA, 15 bp, Artificial Sequence
  Description of Artificial Sequence: Synthetic oligonucleotide
aaaggcgggaagggt

SEQ ID NO: 1912 - DNA, 15 bp, Artificial Sequence
  Description of Artificial Sequence: Synthetic oligonucleotide
gatgtggggagcacc

SEQ ID NO: 1913 - DNA, 15 bp, Artificial Sequence
  Description of Artificial Sequence: Synthetic oligonucleotide
ggggtcagccccccg

SEQ ID NO: 1914 - DNA, 15 bp, Artificial Sequence
  Description of Artificial Sequence: Synthetic oligonucleotide
tatgaccctgccaca

SEQ ID NO: 1915 - DNA, 15 bp, Artificial Sequence
  Description of Artificial Sequence: Synthetic oligonucleotide
gcctcccaaagagcc

SEQ ID NO: 1916 - DNA, 15 bp, Artificial Sequence
  Description of Artificial Sequence: Synthetic oligonucleotide
agcctctgcccggcc

SEQ ID NO: 1917 - DNA, 15 bp, Artificial Sequence
  Description of Artificial Sequence: Synthetic oligonucleotide
ccagggacacaaaca

SEQ ID NO: 1918 - DNA, 15 bp, Artificial Sequence
  Description of Artificial Sequence: Synthetic oligonucleotide
cccggccgccatccc

SEQ ID NO: 1919 - DNA, 15 bp, Artificial Sequence
  Description of Artificial Sequence: Synthetic oligonucleotide
gaggagcgcctctgc

SEQ ID NO: 1920 - DNA, 15 bp, Artificial Sequence
  Description of Artificial Sequence: Synthetic oligonucleotide
tctccctgtcccctc

SEQ ID NO: 1921 - DNA, 15 bp, Artificial Sequence
  Description of Artificial Sequence: Synthetic oligonucleotide
cccgtctgggatgtg

SEQ ID NO: 1922 - DNA, 15 bp, Artificial Sequence
  Description of Artificial Sequence: Synthetic oligonucleotide
tcagccccccgcccg

SEQ ID NO: 1923 - DNA, 15 bp, Artificial Sequence
  Description of Artificial Sequence: Synthetic oligonucleotide
ggggaaatgtgggga

SEQ ID NO: 1924 - DNA, 15 bp, Artificial Sequence
  Description of Artificial Sequence: Synthetic oligonucleotide
cccctctgcccggcc

SEQ ID NO: 1925 - DNA, 15 bp, Artificial Sequence
  Description of Artificial Sequence: Synthetic oligonucleotide
atctgctgaccttcc

SEQ ID NO: 1926 - DNA, 15 bp, Artificial Sequence
  Description of Artificial Sequence: Synthetic oligonucleotide
ggggaaaggtgggga

SEQ ID NO: 1927 - DNA, 15 bp, Artificial Sequence
  Description of Artificial Sequence: Synthetic oligonucleotide
tgctcaatggtgccc

SEQ ID NO: 1928 - DNA, 15 bp, Artificial Sequence
  Description of Artificial Sequence: Synthetic oligonucleotide
tacccccaaccctgt

SEQ ID NO: 1929 - DNA, 15 bp, Artificial Sequence
  Description of Artificial Sequence: Synthetic oligonucleotide
atctgctgaccttct

SEQ ID NO: 1930 - DNA, 15 bp, Artificial Sequence
  Description of Artificial Sequence: Synthetic oligonucleotide
tttgtcgaaaagaaa

SEQ ID NO: 1931 - DNA, 15 bp, Artificial Sequence
  Description of Artificial Sequence: Synthetic oligonucleotide
ttctacggtctccct

SEQ ID NO: 1932 - DNA, 15 bp, Artificial Sequence
  Description of Artificial Sequence: Synthetic oligonucleotide
agatgcttgaaggca

SEQ ID NO: 1933 - DNA, 15 bp, Artificial Sequence
  Description of Artificial Sequence: Synthetic oligonucleotide
ctggctgcccagtct

SEQ ID NO: 1934 - DNA, 15 bp, Artificial Sequence
  Description of Artificial Sequence: Synthetic oligonucleotide
cctcccaaagtgccg

SEQ ID NO: 1935 - DNA, 15 bp, Artificial Sequence
  Description of Artificial Sequence: Synthetic oligonucleotide
ctctgaaacatgtgc

SEQ ID NO: 1936 - DNA, 15 bp, Artificial Sequence
  Description of Artificial Sequence: Synthetic oligonucleotide
ccaaagtgctaagat

SEQ ID NO: 1937 - DNA, 15 bp, Artificial Sequence
  Description of Artificial Sequence: Synthetic oligonucleotide
cgggaggtggggggc

SEQ ID NO: 1938 - DNA, 15 bp, Artificial Sequence
  Description of Artificial Sequence: Synthetic oligonucleotide
acggggtttcgccgt

SEQ ID NO: 1939 - DNA, 15 bp, Artificial Sequence
  Description of Artificial Sequence: Synthetic oligonucleotide
gctcactgcaacctc

SEQ ID NO: 1940 - DNA, 15 bp, Artificial Sequence
  Description of Artificial Sequence: Synthetic oligonucleotide
gatgccgagccaaag

SEQ ID NO: 1941 - DNA, 15 bp, Artificial Sequence
  Description of Artificial Sequence: Synthetic oligonucleotide
gttgccgtgtctgtg

SEQ ID NO: 1942 - DNA, 15 bp, Artificial Sequence
  Description of Artificial Sequence: Synthetic oligonucleotide
cctaggaaaaccaga

SEQ ID NO: 1943 - DNA, 15 bp, Artificial Sequence
  Description of Artificial Sequence: Synthetic oligonucleotide
tggcggttttgtcga

SEQ ID NO: 1944 - DNA, 15 bp, Artificial Sequence
  Description of Artificial Sequence: Synthetic oligonucleotide
tctcccctctctcca

SEQ ID NO: 1945 - DNA, 15 bp, Artificial Sequence
  Description of Artificial Sequence: Synthetic oligonucleotide
cgcgagtgatctgcc

SEQ ID NO: 1946 - DNA, 15 bp, Artificial Sequence
  Description of Artificial Sequence: Synthetic oligonucleotide
tgtgctgtgtcaact

SEQ ID NO: 1947 - DNA, 15 bp, Artificial Sequence
  Description of Artificial Sequence: Synthetic oligonucleotide
tgttcacatgtttat

SEQ ID NO: 1948 - DNA, 15 bp, Artificial Sequence
  Description of Artificial Sequence: Synthetic oligonucleotide
tctccctctcatgcg

SEQ ID NO: 1949 - DNA, 15 bp, Artificial Sequence
  Description of Artificial Sequence: Synthetic oligonucleotide
gaggagcgcctccgc

SEQ ID NO: 1950 - DNA, 15 bp, Artificial Sequence
  Description of Artificial Sequence: Synthetic oligonucleotide
gggaggtgggggggt

SEQ ID NO: 1951 - DNA, 15 bp, Artificial Sequence
  Description of Artificial Sequence: Synthetic oligonucleotide
gtgtggatagaagta

SEQ ID NO: 1952 - DNA, 15 bp, Artificial Sequence
  Description of Artificial Sequence: Synthetic oligonucleotide
aatagaaaaggggga

SEQ ID NO: 1953 - DNA, 15 bp, Artificial Sequence
  Description of Artificial Sequence: Synthetic oligonucleotide
aaggcagcatgctcg

SEQ ID NO: 1954 - DNA, 15 bp, Artificial Sequence
  Description of Artificial Sequence: Synthetic oligonucleotide
accctgccacatccc

SEQ ID NO: 1955 - DNA, 15 bp, Artificial Sequence
  Description of Artificial Sequence: Synthetic oligonucleotide
aagaattatcaataa

SEQ ID NO: 1956 - DNA, 15 bp, Artificial Sequence
  Description of Artificial Sequence: Synthetic oligonucleotide
ccacctcccagccgc

SEQ ID NO: 1957 - DNA, 15 bp, Artificial Sequence
  Description of Artificial Sequence: Synthetic oligonucleotide
ttgttcacatgttta

SEQ ID NO: 1958 - DNA, 15 bp, Artificial Sequence
  Description of Artificial Sequence: Synthetic oligonucleotide
agcccctctgcccgg

SEQ ID NO: 1959 - DNA, 15 bp, Artificial Sequence
  Description of Artificial Sequence: Synthetic oligonucleotide
actccattttgttct

SEQ ID NO: 1960 - DNA, 15 bp, Artificial Sequence
  Description of Artificial Sequence: Synthetic oligonucleotide
gttcactcagtgctc

SEQ ID NO: 1961 - DNA, 15 bp, Artificial Sequence
  Description of Artificial Sequence: Synthetic oligonucleotide
gtcccctctttccac

SEQ ID NO: 1962 - DNA, 15 bp, Artificial Sequence
  Description of Artificial Sequence: Synthetic oligonucleotide
aagggggaaatgtgg

SEQ ID NO: 1963 - DNA, 15 bp, Artificial Sequence
  Description of Artificial Sequence: Synthetic oligonucleotide
ccgggctggtctcca

SEQ ID NO: 1964 - DNA, 15 bp, Artificial Sequence
  Description of Artificial Sequence: Synthetic oligonucleotide
cgccgccacgcctga

SEQ ID NO: 1965 - DNA, 15 bp, Artificial Sequence
  Description of Artificial Sequence: Synthetic oligonucleotide
cgtctgggaggtgag

SEQ ID NO: 1966 - DNA, 15 bp, Artificial Sequence
  Description of Artificial Sequence: Synthetic oligonucleotide
tggtttttgtatttt

SEQ ID NO: 1967 - DNA, 15 bp, Artificial Sequence
  Description of Artificial Sequence: Synthetic oligonucleotide
agtgcagtggcgtga

SEQ ID NO: 1968 - DNA, 15 bp, Artificial Sequence
  Description of Artificial Sequence: Synthetic oligonucleotide
gagaaacacccaaga

SEQ ID NO: 1969 - DNA, 15 bp, Artificial Sequence
  Description of Artificial Sequence: Synthetic oligonucleotide
actggttttcgtatt

SEQ ID NO: 1970 - DNA, 15 bp, Artificial Sequence
  Description of Artificial Sequence: Synthetic oligonucleotide
aagatagagaaatcg

SEQ ID NO: 1971 - DNA, 15 bp, Artificial Sequence
  Description of Artificial Sequence: Synthetic oligonucleotide
cctgcgattgcaggc

SEQ ID NO: 1972 - DNA, 15 bp, Artificial Sequence
  Description of Artificial Sequence: Synthetic oligonucleotide
aagtgccgagattgc

SEQ ID NO: 1973 - DNA, 15 bp, Artificial Sequence
  Description of Artificial Sequence: Synthetic oligonucleotide
tgctgaccttccctc

SEQ ID NO: 1974 - DNA, 15 bp, Artificial Sequence
  Description of Artificial Sequence: Synthetic oligonucleotide
attttgttctgtact

SEQ ID NO: 1975 - DNA, 15 bp, Artificial Sequence
  Description of Artificial Sequence: Synthetic oligonucleotide
atgatcaataaatac

SEQ ID NO: 1976 - DNA, 15 bp, Artificial Sequence
  Description of Artificial Sequence: Synthetic oligonucleotide
ctgccgccatctcgg

SEQ ID NO: 1977 - DNA, 15 bp, Artificial Sequence
  Description of Artificial Sequence: Synthetic oligonucleotide
gtctgggaggtgtac

SEQ ID NO: 1978 - DNA, 15 bp, Artificial Sequence
  Description of Artificial Sequence: Synthetic oligonucleotide
aggtgtacccagcga

SEQ ID NO: 1979 - DNA, 15 bp, Artificial Sequence
  Description of Artificial Sequence: Synthetic oligonucleotide
ttttggtggagacgg

SEQ ID NO: 1980 - DNA, 15 bp, Artificial Sequence
  Description of Artificial Sequence: Synthetic oligonucleotide
tttttgtatttttgg

SEQ ID NO: 1981 - DNA, 15 bp, Artificial Sequence
  Description of Artificial Sequence: Synthetic oligonucleotide
aatcggattgttgct

SEQ ID NO: 1982 - DNA, 15 bp, Artificial Sequence
  Description of Artificial Sequence: Synthetic oligonucleotide
ttgccgtgtctgtgt

SEQ ID NO: 1983 - DNA, 15 bp, Artificial Sequence
  Description of Artificial Sequence: Synthetic oligonucleotide
tctgccccgccgccc

SEQ ID NO: 1984 - DNA, 15 bp, Artificial Sequence
  Description of Artificial Sequence: Synthetic oligonucleotide
tcccaaagagccgga

SEQ ID NO: 1985 - DNA, 15 bp, Artificial Sequence
  Description of Artificial Sequence: Synthetic oligonucleotide
cctacacctcccagc

SEQ ID NO: 1986 - DNA, 15 bp, Artificial Sequence
  Description of Artificial Sequence: Synthetic oligonucleotide
acgatggcggttttg

SEQ ID NO: 1987 - DNA, 15 bp, Artificial Sequence
  Description of Artificial Sequence: Synthetic oligonucleotide
cccgcctcggcctcc

SEQ ID NO: 1988 - DNA, 15 bp, Artificial Sequence
  Description of Artificial Sequence: Synthetic oligonucleotide
ggatgtgaggagcgc

SEQ ID NO: 1989 - DNA, 15 bp, Artificial Sequence
  Description of Artificial Sequence: Synthetic oligonucleotide
ccgggccggtctcca

SEQ ID NO: 1990 - DNA, 15 bp, Artificial Sequence
  Description of Artificial Sequence: Synthetic oligonucleotide
ggctgcccagtctgg

SEQ ID NO: 1991 - DNA, 15 bp, Artificial Sequence
  Description of Artificial Sequence: Synthetic oligonucleotide
ctgtgtccactcagg

SEQ ID NO: 1992 - DNA, 15 bp, Artificial Sequence
  Description of Artificial Sequence: Synthetic oligonucleotide
agtcatcaccactcc

SEQ ID NO: 1993 - DNA, 15 bp, Artificial Sequence
  Description of Artificial Sequence: Synthetic oligonucleotide
ctggttttggtggag

SEQ ID NO: 1994 - DNA, 15 bp, Artificial Sequence
  Description of Artificial Sequence: Synthetic oligonucleotide
ggtgtgcccagcggc

SEQ ID NO: 1995 - DNA, 15 bp, Artificial Sequence
  Description of Artificial Sequence: Synthetic oligonucleotide
cgagccgaagctgga

SEQ ID NO: 1996 - DNA, 15 bp, Artificial Sequence
  Description of Artificial Sequence: Synthetic oligonucleotide
gggctccagtgattc

SEQ ID NO: 1997 - DNA, 15 bp, Artificial Sequence
  Description of Artificial Sequence: Synthetic oligonucleotide
tccactattatccta

SEQ ID NO: 1998 - DNA, 15 bp, Artificial Sequence
  Description of Artificial Sequence: Synthetic oligonucleotide
gaagctggactgtac

SEQ ID NO: 1999 - DNA, 15 bp, Artificial Sequence
  Description of Artificial Sequence: Synthetic oligonucleotide
ggccgcccagtctgg

SEQ ID NO: 2000 - DNA, 15 bp, Artificial Sequence
  Description of Artificial Sequence: Synthetic oligonucleotide
tggagacggggtttc

SEQ ID NO: 2001 - DNA, 15 bp, Artificial Sequence
  Description of Artificial Sequence: Synthetic oligonucleotide
tcacttgtttatctg

SEQ ID NO: 2002 - DNA, 15 bp, Artificial Sequence
  Description of Artificial Sequence: Synthetic oligonucleotide
ccctgccacatcccc

SEQ ID NO: 2003 - DNA, 15 bp, Artificial Sequence
  Description of Artificial Sequence: Synthetic oligonucleotide
tctcctgcctcggcc

SEQ ID NO: 2004 - DNA, 15 bp, Artificial Sequence
  Description of Artificial Sequence: Synthetic oligonucleotide
taggagactccattt

SEQ ID NO: 2005 - DNA, 15 bp, Artificial Sequence
  Description of Artificial Sequence: Synthetic oligonucleotide
gacggagtctggttc

SEQ ID NO: 2006 - DNA, 15 bp, Artificial Sequence
  Description of Artificial Sequence: Synthetic oligonucleotide
ttggccgggctggtc

SEQ ID NO: 2007 - DNA, 15 bp, Artificial Sequence
  Description of Artificial Sequence: Synthetic oligonucleotide
gaaaaccagagacct

SEQ ID NO: 2008 - DNA, 15 bp, Artificial Sequence
  Description of Artificial Sequence: Synthetic oligonucleotide
gatgtgaggagcccc

SEQ ID NO: 2009 - DNA, 15 bp, Artificial Sequence
  Description of Artificial Sequence: Synthetic oligonucleotide
tagaagtagacatgg

SEQ ID NO: 2010 - DNA, 15 bp, Artificial Sequence
  Description of Artificial Sequence: Synthetic oligonucleotide
ccctctccctgtccc

SEQ ID NO: 2011 - DNA, 15 bp, Artificial Sequence
  Description of Artificial Sequence: Synthetic oligonucleotide
tgggatgctgttaat

SEQ ID NO: 2012 - DNA, 15 bp, Artificial Sequence
  Description of Artificial Sequence: Synthetic oligonucleotide
cccgaggtgccggga

SEQ ID NO: 2013 - DNA, 15 bp, Artificial Sequence
  Description of Artificial Sequence: Synthetic oligonucleotide
catcccgtctgggaa

SEQ ID NO: 2014 - DNA, 15 bp, Artificial Sequence
  Description of Artificial Sequence: Synthetic oligonucleotide
tcaatggtgcccagg

SEQ ID NO: 2015 - DNA, 15 bp, Artificial Sequence
  Description of Artificial Sequence: Synthetic oligonucleotide
ccggccgccccttct

SEQ ID NO: 2016 - DNA, 15 bp, Artificial Sequence
  Description of Artificial Sequence: Synthetic oligonucleotide
gacaatggcggtttt

SEQ ID NO: 2017 - DNA, 15 bp, Artificial Sequence
  Description of Artificial Sequence: Synthetic oligonucleotide
accattgagaacggg

SEQ ID NO: 2018 - DNA, 15 bp, Artificial Sequence
  Description of Artificial Sequence: Synthetic oligonucleotide
aaaagaaaaggggga

SEQ ID NO: 2019 - DNA, 15 bp, Artificial Sequence
  Description of Artificial Sequence: Synthetic oligonucleotide
caacagctcattgag

SEQ ID NO: 2020 - DNA, 15 bp, Artificial Sequence
  Description of Artificial Sequence: Synthetic oligonucleotide
gagaacgggccagga

SEQ ID NO: 2021 - DNA, 15 bp, Artificial Sequence
  Description of Artificial Sequence: Synthetic oligonucleotide
ctgaccgcgagtgat

SEQ ID NO: 2022 - DNA, 15 bp, Artificial Sequence
  Description of Artificial Sequence: Synthetic oligonucleotide
atcagggacacaaac

SEQ ID NO: 2023 - DNA, 15 bp, Artificial Sequence
  Description of Artificial Sequence: Synthetic oligonucleotide
cgcccctactgggaa

SEQ ID NO: 2024 - DNA, 15 bp, Artificial Sequence
  Description of Artificial Sequence: Synthetic oligonucleotide
tgcagacggagtctc

SEQ ID NO: 2025 - DNA, 15 bp, Artificial Sequence
  Description of Artificial Sequence: Synthetic oligonucleotide
agggcggtgcaagat

SEQ ID NO: 2026 - DNA, 15 bp, Artificial Sequence
  Description of Artificial Sequence: Synthetic oligonucleotide
tgttcacgtgtttat

SEQ ID NO: 2027 - DNA, 15 bp, Artificial Sequence
  Description of Artificial Sequence: Synthetic oligonucleotide
tgcagacggagtctg

SEQ ID NO: 2028 - DNA, 15 bp, Artificial Sequence
  Description of Artificial Sequence: Synthetic oligonucleotide
gaaaagggggaaatg

SEQ ID NO: 2029 - DNA, 15 bp, Artificial Sequence
  Description of Artificial Sequence: Synthetic oligonucleotide
gccgcccatcgtctg

SEQ ID NO: 2030 - DNA, 15 bp, Artificial Sequence
  Description of Artificial Sequence: Synthetic oligonucleotide
atgtgctttgttaaa

SEQ ID NO: 2031 - DNA, 15 bp, Artificial Sequence
  Description of Artificial Sequence: Synthetic oligonucleotide
ctgtgtagaaagaag

SEQ ID NO: 2032 - DNA, 15 bp, Artificial Sequence
  Description of Artificial Sequence: Synthetic oligonucleotide
cgtgttggccgggct

SEQ ID NO: 2033 - DNA, 15 bp, Artificial Sequence
  Description of Artificial Sequence: Synthetic oligonucleotide
gtgtgcccaacagct

SEQ ID NO: 2034 - DNA, 15 bp, Artificial Sequence
  Description of Artificial Sequence: Synthetic oligonucleotide
cagccgccccgtccg

SEQ ID NO: 2035 - DNA, 15 bp, Artificial Sequence
  Description of Artificial Sequence: Synthetic oligonucleotide
tgccgaggctggact

SEQ ID NO: 2036 - DNA, 15 bp, Artificial Sequence
  Description of Artificial Sequence: Synthetic oligonucleotide
ctaggaagtgaggag

SEQ ID NO: 2037 - DNA, 15 bp, Artificial Sequence
  Description of Artificial Sequence: Synthetic oligonucleotide
aaacagatgcttgaa

SEQ ID NO: 2038 - DNA, 15 bp, Artificial Sequence
  Description of Artificial Sequence: Synthetic oligonucleotide
agtacccagggacac

SEQ ID NO: 2039 - DNA, 15 bp, Artificial Sequence
  Description of Artificial Sequence: Synthetic oligonucleotide
tctccctctccctgt

SEQ ID NO: 2040 - DNA, 15 bp, Artificial Sequence
  Description of Artificial Sequence: Synthetic oligonucleotide
tgttggccgggccgg

SEQ ID NO: 2041 - DNA, 15 bp, Artificial Sequence
  Description of Artificial Sequence: Synthetic oligonucleotide
gcagtggcgtgatct

SEQ ID NO: 2042 - DNA, 15 bp, Artificial Sequence
  Description of Artificial Sequence: Synthetic oligonucleotide
agccggattgcagcc

SEQ ID NO: 2043 - DNA, 15 bp, Artificial Sequence
  Description of Artificial Sequence: Synthetic oligonucleotide
ggccgcagggacctc

SEQ ID NO: 2044 - DNA, 15 bp, Artificial Sequence
  Description of Artificial Sequence: Synthetic oligonucleotide
aaagaaaagggggaa

SEQ ID NO: 2045 - DNA, 15 bp, Artificial Sequence
  Description of Artificial Sequence: Synthetic oligonucleotide
acgggccaggatgac

SEQ ID NO: 2046 - DNA, 15 bp, Artificial Sequence
  Description of Artificial Sequence: Synthetic oligonucleotide
agcctgccgagtgcc

SEQ ID NO: 2047 - DNA, 15 bp, Artificial Sequence
  Description of Artificial Sequence: Synthetic oligonucleotide
aacactgcggaaggc

SEQ ID NO: 2048 - DNA, 15 bp, Artificial Sequence
  Description of Artificial Sequence: Synthetic oligonucleotide
tgtttatctgctgac

SEQ ID NO: 2049 - DNA, 15 bp, Artificial Sequence
  Description of Artificial Sequence: Synthetic oligonucleotide
tgtgtagaaagaggt

SEQ ID NO: 2050 - DNA, 15 bp, Artificial Sequence
  Description of Artificial Sequence: Synthetic oligonucleotide
tgcagtggcgtgatc

SEQ ID NO: 2051 - DNA, 15 bp, Artificial Sequence
  Description of Artificial Sequence: Synthetic oligonucleotide
cgcagggtcctctgc

SEQ ID NO: 2052 - DNA, 15 bp, Artificial Sequence
  Description of Artificial Sequence: Synthetic oligonucleotide
cactgcaacctccct

SEQ ID NO: 2053 - DNA, 15 bp, Artificial Sequence
  Description of Artificial Sequence: Synthetic oligonucleotide
tgtgctttgttaaac

SEQ ID NO: 2054 - DNA, 15 bp, Artificial Sequence
  Description of Artificial Sequence: Synthetic oligonucleotide
tatgaccctgccaaa

SEQ ID NO: 2055 - DNA, 15 bp, Artificial Sequence
  Description of Artificial Sequence: Synthetic oligonucleotide
ctctgcccggccagc

SEQ ID NO: 2056 - DNA, 15 bp, Artificial Sequence
  Description of Artificial Sequence: Synthetic oligonucleotide
ccactattgtcccat

SEQ ID NO: 2057 - DNA, 15 bp, Artificial Sequence
  Description of Artificial Sequence: Synthetic oligonucleotide
ccactattatcctat

SEQ ID NO: 2058 - DNA, 15 bp, Artificial Sequence
  Description of Artificial Sequence: Synthetic oligonucleotide
atgacaatggcggct

SEQ ID NO: 2059 - DNA, 15 bp, Artificial Sequence
  Description of Artificial Sequence: Synthetic oligonucleotide
ctgtactaagaaaaa

SEQ ID NO: 2060 - DNA, 15 bp, Artificial Sequence
  Description of Artificial Sequence: Synthetic oligonucleotide
tgtgaggagcccctc

SEQ ID NO: 2061 - DNA, 15 bp, Artificial Sequence
  Description of Artificial Sequence: Synthetic oligonucleotide
ttcgccgtgttggcc

SEQ ID NO: 2062 - DNA, 15 bp, Artificial Sequence
  Description of Artificial Sequence: Synthetic oligonucleotide
atagaagtagacatg

SEQ ID NO: 2063 - DNA, 15 bp, Artificial Sequence
  Description of Artificial Sequence: Synthetic oligonucleotide
taatctcaagtaatc

SEQ ID NO: 2064 - DNA, 15 bp, Artificial Sequence
  Description of Artificial Sequence: Synthetic oligonucleotide
aaagagagatcagat

SEQ ID NO: 2065 - DNA, 15 bp, Artificial Sequence
  Description of Artificial Sequence: Synthetic oligonucleotide
tcatcaccactccct

SEQ ID NO: 2066 - DNA, 15 bp, Artificial Sequence
  Description of Artificial Sequence: Synthetic oligonucleotide
tgctgttgatctgtg

SEQ ID NO: 2067 - DNA, 15 bp, Artificial Sequence
  Description of Artificial Sequence: Synthetic oligonucleotide
catccccctctccga

SEQ ID NO: 2068 - DNA, 15 bp, Artificial Sequence
  Description of Artificial Sequence: Synthetic oligonucleotide
gaggagcccctctgc

SEQ ID NO: 2069 - DNA, 15 bp, Artificial Sequence
  Description of Artificial Sequence: Synthetic oligonucleotide
ctgtactgccgccat

SEQ ID NO: 2070 - DNA, 15 bp, Artificial Sequence
  Description of Artificial Sequence: Synthetic oligonucleotide
ggtggagacggggtt

SEQ ID NO: 2071 - DNA, 15 bp, Artificial Sequence
  Description of Artificial Sequence: Synthetic oligonucleotide
gttttcgtatttttt

SEQ ID NO: 2072 - DNA, 15 bp, Artificial Sequence
  Description of Artificial Sequence: Synthetic oligonucleotide
acctctgccccgccg

SEQ ID NO: 2073 - DNA, 15 bp, Artificial Sequence
  Description of Artificial Sequence: Synthetic oligonucleotide
actgtactgctgcca

SEQ ID NO: 2074 - DNA, 15 bp, Artificial Sequence
  Description of Artificial Sequence: Synthetic oligonucleotide
tgtacccaacagctc

SEQ ID NO: 2075 - DNA, 15 bp, Artificial Sequence
  Description of Artificial Sequence: Synthetic oligonucleotide
gatggttgccgtgtc

SEQ ID NO: 2076 - DNA, 15 bp, Artificial Sequence
  Description of Artificial Sequence: Synthetic oligonucleotide
cagtggcgtgatctc

SEQ ID NO: 2077 - DNA, 15 bp, Artificial Sequence
  Description of Artificial Sequence: Synthetic oligonucleotide
gtgtccactcagggt

SEQ ID NO: 2078 - DNA, 15 bp, Artificial Sequence
  Description of Artificial Sequence: Synthetic oligonucleotide
tagaaagaggtagac

SEQ ID NO: 2079 - DNA, 15 bp, Artificial Sequence
  Description of Artificial Sequence: Synthetic oligonucleotide
ctcgggctccagtga

SEQ ID NO: 2080 - DNA, 15 bp, Artificial Sequence
  Description of Artificial Sequence: Synthetic oligonucleotide
gcccagcggctcatt

SEQ ID NO: 2081 - DNA, 15 bp, Artificial Sequence
  Description of Artificial Sequence: Synthetic oligonucleotide
cagtgattctcctgc

SEQ ID NO: 2082 - DNA, 15 bp, Artificial Sequence
  Description of Artificial Sequence: Synthetic oligonucleotide
gcctctgcccggcca

SEQ ID NO: 2083 - DNA, 15 bp, Artificial Sequence
  Description of Artificial Sequence: Synthetic oligonucleotide
tgtgtcaactcaggg

SEQ ID NO: 2084 - DNA, 15 bp, Artificial Sequence
  Description of Artificial Sequence: Synthetic oligonucleotide
tgtgtctgtgtagaa

SEQ ID NO: 2085 - DNA, 15 bp, Artificial Sequence
  Description of Artificial Sequence: Synthetic oligonucleotide
ttgtcccatgaccct

SEQ ID NO: 2086 - DNA, 15 bp, Artificial Sequence
  Description of Artificial Sequence: Synthetic oligonucleotide
aaacacccaagaatt

SEQ ID NO: 2087 - DNA, 15 bp, Artificial Sequence
  Description of Artificial Sequence: Synthetic oligonucleotide
aaggggggaaaggtg

SEQ ID NO: 2088 - DNA, 15 bp, Artificial Sequence
  Description of Artificial Sequence: Synthetic oligonucleotide
ttttgtatttttggt

SEQ ID NO: 2089 - DNA, 15 bp, Artificial Sequence
  Description of Artificial Sequence: Synthetic oligonucleotide
ttatctgctgacctt

SEQ ID NO: 2090 - DNA, 15 bp, Artificial Sequence
  Description of Artificial Sequence: Synthetic oligonucleotide
aagagccggattgca

SEQ ID NO: 2091 - DNA, 15 bp, Artificial Sequence
  Description of Artificial Sequence: Synthetic oligonucleotide
aagtgaggagcccct

SEQ ID NO: 2092 - DNA, 15 bp, Artificial Sequence
  Description of Artificial Sequence: Synthetic oligonucleotide
cctggcctcgagtga

SEQ ID NO: 2093 - DNA, 15 bp, Artificial Sequence
  Description of Artificial Sequence: Synthetic oligonucleotide
actgcaacctccctg

SEQ ID NO: 2094 - DNA, 15 bp, Artificial Sequence
  Description of Artificial Sequence: Synthetic oligonucleotide
gcccggccaccgccc

SEQ ID NO: 2095 - DNA, 15 bp, Artificial Sequence
  Description of Artificial Sequence: Synthetic oligonucleotide
aactcagggttaaat

SEQ ID NO: 2096 - DNA, 15 bp, Artificial Sequence
  Description of Artificial Sequence: Synthetic oligonucleotide
ctggccgcccatcgt

SEQ ID NO: 2097 - DNA, 15 bp, Artificial Sequence
  Description of Artificial Sequence: Synthetic oligonucleotide
caggctggagtgcag

SEQ ID NO: 2098 - DNA, 15 bp, Artificial Sequence
  Description of Artificial Sequence: Synthetic oligonucleotide
tgccacatccccctc

SEQ ID NO: 2099 - DNA, 15 bp, Artificial Sequence
  Description of Artificial Sequence: Synthetic oligonucleotide
ggccgggccggtctc

SEQ ID NO: 2100 - DNA, 15 bp, Artificial Sequence
  Description of Artificial Sequence: Synthetic oligonucleotide
ctgactggtttttgt

SEQ ID NO: 2101 - DNA, 15 bp, Artificial Sequence
  Description of Artificial Sequence: Synthetic oligonucleotide
agggttaaatggatt

SEQ ID NO: 2102 - DNA, 15 bp, Artificial Sequence
  Description of Artificial Sequence: Synthetic oligonucleotide
tgccgagtgcctgcg

SEQ ID NO: 2103 - DNA, 15 bp, Artificial Sequence
  Description of Artificial Sequence: Synthetic oligonucleotide
agtctgggaagtgag

SEQ ID NO: 2104 - DNA, 15 bp, Artificial Sequence
  Description of Artificial Sequence: Synthetic oligonucleotide
ttgttactgtgtctg

SEQ ID NO: 2105 - DNA, 15 bp, Artificial Sequence
  Description of Artificial Sequence: Synthetic oligonucleotide
cgctgtgttgaccgg

SEQ ID NO: 2106 - DNA, 15 bp, Artificial Sequence
  Description of Artificial Sequence: Synthetic oligonucleotide
acgtgtttatctgct

SEQ ID NO: 2107 - DNA, 15 bp, Artificial Sequence
  Description of Artificial Sequence: Synthetic oligonucleotide
aacatgtgctgtgtc

SEQ ID NO: 2108 - DNA, 15 bp, Artificial Sequence
  Description of Artificial Sequence: Synthetic oligonucleotide
gccatgatgacgatg

SEQ ID NO: 2109 - DNA, 15 bp, Artificial Sequence
  Description of Artificial Sequence: Synthetic oligonucleotide
aacgggccatgatga

SEQ ID NO: 2110 - DNA, 15 bp, Artificial Sequence
  Description of Artificial Sequence: Synthetic oligonucleotide
tgtgctctctgaaac

SEQ ID NO: 2111 - DNA, 15 bp, Artificial Sequence
  Description of Artificial Sequence: Synthetic oligonucleotide
aggagcgcctcttcc

SEQ ID NO: 2112 - DNA, 15 bp, Artificial Sequence
  Description of Artificial Sequence: Synthetic oligonucleotide
ctctgcctggccgcc

SEQ ID NO: 2113 - DNA, 15 bp, Artificial Sequence
  Description of Artificial Sequence: Synthetic oligonucleotide
tcggatggttgccgg

SEQ ID NO: 2114 - DNA, 15 bp, Artificial Sequence
  Description of Artificial Sequence: Synthetic oligonucleotide
ggccgccaccccgtc

SEQ ID NO: 2115 - DNA, 15 bp, Artificial Sequence
  Description of Artificial Sequence: Synthetic oligonucleotide
ctcctgcctcagcct

SEQ ID NO: 2116 - DNA, 15 bp, Artificial Sequence
  Description of Artificial Sequence: Synthetic oligonucleotide
gctcaatggtgccca

SEQ ID NO: 2117 - DNA, 15 bp, Artificial Sequence
  Description of Artificial Sequence: Synthetic oligonucleotide
aatgtggggaaaaga

SEQ ID NO: 2118 - DNA, 15 bp, Artificial Sequence
  Description of Artificial Sequence: Synthetic oligonucleotide
cggatggttgccggg

SEQ ID NO: 2119 - DNA, 15 bp, Artificial Sequence
  Description of Artificial Sequence: Synthetic oligonucleotide
ttctgtactaagaaa

SEQ ID NO: 2120 - DNA, 15 bp, Artificial Sequence
  Description of Artificial Sequence: Synthetic oligonucleotide
aaaggggggaaaggt

SEQ ID NO: 2121 - DNA, 15 bp, Artificial Sequence
  Description of Artificial Sequence: Synthetic oligonucleotide
tctgtactaagaaaa

SEQ ID NO: 2122 - DNA, 15 bp, Artificial Sequence
  Description of Artificial Sequence: Synthetic oligonucleotide
cgcctcttcccggcc

SEQ ID NO: 2123 - DNA, 15 bp, Artificial Sequence
  Description of Artificial Sequence: Synthetic oligonucleotide
ccaccgccccgtctg

SEQ ID NO: 2124 - DNA, 15 bp, Artificial Sequence
  Description of Artificial Sequence: Synthetic oligonucleotide
tgatctgcccgcctc

SEQ ID NO: 2125 - DNA, 15 bp, Artificial Sequence
  Description of Artificial Sequence: Synthetic oligonucleotide
agtagacatgggaga

SEQ ID NO: 2126 - DNA, 15 bp, Artificial Sequence
  Description of Artificial Sequence: Synthetic oligonucleotide
catgtgctgtgtcca

SEQ ID NO: 2127 - DNA, 15 bp, Artificial Sequence
  Description of Artificial Sequence: Synthetic oligonucleotide
caaccacctcccagc

SEQ ID NO: 2128 - DNA, 15 bp, Artificial Sequence
  Description of Artificial Sequence: Synthetic oligonucleotide
ctctccctctccctg

SEQ ID NO: 2129 - DNA, 15 bp, Artificial Sequence
  Description of Artificial Sequence: Synthetic oligonucleotide
ccgagccgaggctgg

SEQ ID NO: 2130 - DNA, 15 bp, Artificial Sequence
  Description of Artificial Sequence: Synthetic oligonucleotide
acaacctccacctcc

SEQ ID NO: 2131 - DNA, 15 bp, Artificial Sequence
  Description of Artificial Sequence: Synthetic oligonucleotide
cagggacacaaacac

SEQ ID NO: 2132 - DNA, 15 bp, Artificial Sequence
  Description of Artificial Sequence: Synthetic oligonucleotide
tcctgttgatctgtg

SEQ ID NO: 2133 - DNA, 15 bp, Artificial Sequence
  Description of Artificial Sequence: Synthetic oligonucleotide
cccctctgcctggcc

SEQ ID NO: 2134 - DNA, 15 bp, Artificial Sequence
  Description of Artificial Sequence: Synthetic oligonucleotide
gggaaaagatagaga

SEQ ID NO: 2135 - DNA, 15 bp, Artificial Sequence
  Description of Artificial Sequence: Synthetic oligonucleotide
tcaccactccctaat

SEQ ID NO: 2136 - DNA, 15 bp, Artificial Sequence
  Description of Artificial Sequence: Synthetic oligonucleotide
ctgactggttttcgt

SEQ ID NO: 2137 - DNA, 15 bp, Artificial Sequence
  Description of Artificial Sequence: Synthetic oligonucleotide
ccgcccctactggga

SEQ ID NO: 2138 - DNA, 15 bp, Artificial Sequence
  Description of Artificial Sequence: Synthetic oligonucleotide
cctatgaccctgcca

SEQ ID NO: 2139 - DNA, 15 bp, Artificial Sequence
  Description of Artificial Sequence: Synthetic oligonucleotide
agccgaggctggact

SEQ ID NO: 2140 - DNA, 15 bp, Artificial Sequence
  Description of Artificial Sequence: Synthetic oligonucleotide
cccccaaccccgtgc

SEQ ID NO: 2141 - DNA, 15 bp, Artificial Sequence
  Description of Artificial Sequence: Synthetic oligonucleotide
cgtctgggatgtgag

SEQ ID NO: 2142 - DNA, 15 bp, Artificial Sequence
  Description of Artificial Sequence: Synthetic oligonucleotide
cctgccgagtgcctg

SEQ ID NO: 2143 - DNA, 15 bp, Artificial Sequence
  Description of Artificial Sequence: Synthetic oligonucleotide
atcaccactccctaa

SEQ ID NO: 2144 - DNA, 15 bp, Artificial Sequence
  Description of Artificial Sequence: Synthetic oligonucleotide
aggcgcgcgccgcca

SEQ ID NO: 2145 - DNA, 15 bp, Artificial Sequence
  Description of Artificial Sequence: Synthetic oligonucleotide
agcgcctctgccccg

SEQ ID NO: 2146 - DNA, 15 bp, Artificial Sequence
  Description of Artificial Sequence: Synthetic oligonucleotide
tttgtcgaatagaaa

SEQ ID NO: 2147 - DNA, 15 bp, Artificial Sequence
  Description of Artificial Sequence: Synthetic oligonucleotide
ggtgtacccaacagc

SEQ ID NO: 2148 - DNA, 15 bp, Artificial Sequence
  Description of Artificial Sequence: Synthetic oligonucleotide
ttcactcagtgctca

SEQ ID NO: 2149 - DNA, 15 bp, Artificial Sequence
  Description of Artificial Sequence: Synthetic oligonucleotide
gactggttttggtgg

SEQ ID NO: 2150 - DNA, 15 bp, Artificial Sequence
  Description of Artificial Sequence: Synthetic oligonucleotide
gggacacaaacactg

SEQ ID NO: 2151 - DNA, 15 bp, Artificial Sequence
  Description of Artificial Sequence: Synthetic oligonucleotide
tcgaatagaaaaggg

SEQ ID NO: 2152 - DNA, 15 bp, Artificial Sequence
  Description of Artificial Sequence: Synthetic oligonucleotide
gaaatcggatggttg

SEQ ID NO: 2153 - DNA, 15 bp, Artificial Sequence
  Description of Artificial Sequence: Synthetic oligonucleotide
ggccagccgccccgt

SEQ ID NO: 2154 - DNA, 15 bp, Artificial Sequence
  Description of Artificial Sequence: Synthetic oligonucleotide
ctggagtgcagtggc

SEQ ID NO: 2155 - DNA, 15 bp, Artificial Sequence
  Description of Artificial Sequence: Synthetic oligonucleotide
agaaaaattcttctg

SEQ ID NO: 2156 - DNA, 15 bp, Artificial Sequence
  Description of Artificial Sequence: Synthetic oligonucleotide
cactattgtcccatg

SEQ ID NO: 2157 - DNA, 15 bp, Artificial Sequence
  Description of Artificial Sequence: Synthetic oligonucleotide
ccggccaccaccccg

SEQ ID NO: 2158 - DNA, 15 bp, Artificial Sequence
  Description of Artificial Sequence: Synthetic oligonucleotide
ccgccatcccatcta

SEQ ID NO: 2159 - DNA, 15 bp, Artificial Sequence
  Description of Artificial Sequence: Synthetic oligonucleotide
tctgtgagaaacacc

SEQ ID NO: 2160 - DNA, 15 bp, Artificial Sequence
  Description of Artificial Sequence: Synthetic oligonucleotide
caatgttgcccaggc

SEQ ID NO: 2161 - DNA, 15 bp, Artificial Sequence
  Description of Artificial Sequence: Synthetic oligonucleotide
gtctgtgtagaaaga

SEQ ID NO: 2162 - DNA, 15 bp, Artificial Sequence
  Description of Artificial Sequence: Synthetic oligonucleotide
tgacaatggcggctt

SEQ ID NO: 2163 - DNA, 15 bp, Artificial Sequence
  Description of Artificial Sequence: Synthetic oligonucleotide
ccctctgcctggccg

SEQ ID NO: 2164 - DNA, 15 bp, Artificial Sequence
  Description of Artificial Sequence: Synthetic oligonucleotide
tccctgtcccctctt

SEQ ID NO: 2165 - DNA, 15 bp, Artificial Sequence
  Description of Artificial Sequence: Synthetic oligonucleotide
cgaggctggactgta

SEQ ID NO: 2166 - DNA, 15 bp, Artificial Sequence
  Description of Artificial Sequence: Synthetic oligonucleotide
tgacaatggcggttt

SEQ ID NO: 2167 - DNA, 15 bp, Artificial Sequence
  Description of Artificial Sequence: Synthetic oligonucleotide
aaaaaaattaaaaaa

SEQ ID NO: 2168 - DNA, 15 bp, Artificial Sequence
  Description of Artificial Sequence: Synthetic oligonucleotide
tctgggatgtgagga

SEQ ID NO: 2169 - DNA, 15 bp, Artificial Sequence
  Description of Artificial Sequence: Synthetic oligonucleotide
gggaagggtggggaa

SEQ ID NO: 2170 - DNA, 15 bp, Artificial Sequence
  Description of Artificial Sequence: Synthetic oligonucleotide
aaaagatagagaaat

SEQ ID NO: 2171 - DNA, 15 bp, Artificial Sequence
  Description of Artificial Sequence: Synthetic oligonucleotide
tgtactaagaaaaat

SEQ ID NO: 2172 - DNA, 15 bp, Artificial Sequence
  Description of Artificial Sequence: Synthetic oligonucleotide
tgctgtgtccactca

SEQ ID NO: 2173 - DNA, 15 bp, Artificial Sequence
  Description of Artificial Sequence: Synthetic oligonucleotide
aagagtcatcaccac

SEQ ID NO: 2174 - DNA, 15 bp, Artificial Sequence
  Description of Artificial Sequence: Synthetic oligonucleotide
ctctcccctctctcc

SEQ ID NO: 2175 - DNA, 15 bp, Artificial Sequence
  Description of Artificial Sequence: Synthetic oligonucleotide
atgtttatctgctga

SEQ ID NO: 2176 - DNA, 15 bp, Artificial Sequence
  Description of Artificial Sequence: Synthetic oligonucleotide
caaacactgcggaag

SEQ ID NO: 2177 - DNA, 15 bp, Artificial Sequence
  Description of Artificial Sequence: Synthetic oligonucleotide
catgtttatctgctg

SEQ ID NO: 2178 - DNA, 15 bp, Artificial Sequence
  Description of Artificial Sequence: Synthetic oligonucleotide
tgcaggcacgcgccg

SEQ ID NO: 2179 - DNA, 15 bp, Artificial Sequence
  Description of Artificial Sequence: Synthetic oligonucleotide
ccgagaaacacccaa

SEQ ID NO: 2180 - DNA, 15 bp, Artificial Sequence
  Description of Artificial Sequence: Synthetic oligonucleotide
aggtgtgcccagcgg

SEQ ID NO: 2181 - DNA, 15 bp, Artificial Sequence
  Description of Artificial Sequence: Synthetic oligonucleotide
ccgtgtctgtgtaga

SEQ ID NO: 2182 - DNA, 15 bp, Artificial Sequence
  Description of Artificial Sequence: Synthetic oligonucleotide
tgtcgaatagaaaag

SEQ ID NO: 2183 - DNA, 15 bp, Artificial Sequence
  Description of Artificial Sequence: Synthetic oligonucleotide
cggggtttcgctgtg

SEQ ID NO: 2184 - DNA, 15 bp, Artificial Sequence
  Description of Artificial Sequence: Synthetic oligonucleotide
gagtgcctgcgattg

SEQ ID NO: 2185 - DNA, 15 bp, Artificial Sequence
  Description of Artificial Sequence: Synthetic oligonucleotide
tacaacctccacctc

SEQ ID NO: 2186 - DNA, 15 bp, Artificial Sequence
  Description of Artificial Sequence: Synthetic oligonucleotide
ccttccctccactat

SEQ ID NO: 2187 - DNA, 15 bp, Artificial Sequence
  Description of Artificial Sequence: Synthetic oligonucleotide
tggggaaaagattga

SEQ ID NO: 2188 - DNA, 15 bp, Artificial Sequence
  Description of Artificial Sequence: Synthetic oligonucleotide
tccctctgttgccga

SEQ ID NO: 2189 - DNA, 15 bp, Artificial Sequence
  Description of Artificial Sequence: Synthetic oligonucleotide
gcaggcacgcgccgc

SEQ ID NO: 2190 - DNA, 15 bp, Artificial Sequence
  Description of Artificial Sequence: Synthetic oligonucleotide
taaccttacccccaa

SEQ ID NO: 2191 - DNA, 15 bp, Artificial Sequence
  Description of Artificial Sequence: Synthetic oligonucleotide
ccgcccggccagccg

SEQ ID NO: 2192 - DNA, 15 bp, Artificial Sequence
  Description of Artificial Sequence: Synthetic oligonucleotide
ctcccaaagtgccga

SEQ ID NO: 2193 - DNA, 15 bp, Artificial Sequence
  Description of Artificial Sequence: Synthetic oligonucleotide
gcccaacagctcatt

SEQ ID NO: 2194 - DNA, 15 bp, Artificial Sequence
  Description of Artificial Sequence: Synthetic oligonucleotide
gccatcccgtctggg

SEQ ID NO: 2195 - DNA, 15 bp, Artificial Sequence
  Description of Artificial Sequence: Synthetic oligonucleotide
ccttctctccactat

SEQ ID NO: 2196 - DNA, 15 bp, Artificial Sequence
  Description of Artificial Sequence: Synthetic oligonucleotide
ctgcctcagcctgcc

SEQ ID NO: 2197 - DNA, 15 bp, Artificial Sequence
  Description of Artificial Sequence: Synthetic oligonucleotide
tcattggggatgggc

SEQ ID NO: 2198 - DNA, 15 bp, Artificial Sequence
  Description of Artificial Sequence: Synthetic oligonucleotide
ccgccccgtccggga

SEQ ID NO: 2199 - DNA, 15 bp, Artificial Sequence
  Description of Artificial Sequence: Synthetic oligonucleotide
aaggcgggaaaggtg

SEQ ID NO: 2200 - DNA, 15 bp, Artificial Sequence
  Description of Artificial Sequence: Synthetic oligonucleotide
cgtttttttttggtg

SEQ ID NO: 2201 - DNA, 15 bp, Artificial Sequence
  Description of Artificial Sequence: Synthetic oligonucleotide
ccccaaccccgtgct

SEQ ID NO: 2202 - DNA, 15 bp, Artificial Sequence
  Description of Artificial Sequence: Synthetic oligonucleotide
gtctcgttcactcag

SEQ ID NO: 2203 - DNA, 15 bp, Artificial Sequence
  Description of Artificial Sequence: Synthetic oligonucleotide
tggggagcacctctg

SEQ ID NO: 2204 - DNA, 15 bp, Artificial Sequence
  Description of Artificial Sequence: Synthetic oligonucleotide
ctgaccttctctcca

SEQ ID NO: 2205 - DNA, 15 bp, Artificial Sequence
  Description of Artificial Sequence: Synthetic oligonucleotide
ggccgccccttctgg

SEQ ID NO: 2206 - DNA, 15 bp, Artificial Sequence
  Description of Artificial Sequence: Synthetic oligonucleotide
gactggttttcgttt

SEQ ID NO: 2207 - DNA, 15 bp, Artificial Sequence
  Description of Artificial Sequence: Synthetic oligonucleotide
atgacgatggcggtt

SEQ ID NO: 2208 - DNA, 15 bp, Artificial Sequence
  Description of Artificial Sequence: Synthetic oligonucleotide
agtgctcaatgttgc

SEQ ID NO: 2209 - DNA, 15 bp, Artificial Sequence
  Description of Artificial Sequence: Synthetic oligonucleotide
tggattaagggcggt

SEQ ID NO: 2210 - DNA, 15 bp, Artificial Sequence
  Description of Artificial Sequence: Synthetic oligonucleotide
ctgcctggctgccca

SEQ ID NO: 2211 - DNA, 15 bp, Artificial Sequence
  Description of Artificial Sequence: Synthetic oligonucleotide
tttgtggaatagaaa

SEQ ID NO: 2212 - DNA, 15 bp, Artificial Sequence
  Description of Artificial Sequence: Synthetic oligonucleotide
gtgggggggtcagcc

SEQ ID NO: 2213 - DNA, 15 bp, Artificial Sequence
  Description of Artificial Sequence: Synthetic oligonucleotide
cttgggatgctgttg

SEQ ID NO: 2214 - DNA, 15 bp, Artificial Sequence
  Description of Artificial Sequence: Synthetic oligonucleotide
cttgggatgctgtta

SEQ ID NO: 2215 - DNA, 15 bp, Artificial Sequence
  Description of Artificial Sequence: Synthetic oligonucleotide
agatcagattgttac

SEQ ID NO: 2216 - DNA, 15 bp, Artificial Sequence
  Description of Artificial Sequence: Synthetic oligonucleotide
gcctggctgcccagt

SEQ ID NO: 2217 - DNA, 15 bp, Artificial Sequence
  Description of Artificial Sequence: Synthetic oligonucleotide
tcgggctccagtgat

SEQ ID NO: 2218 - DNA, 15 bp, Artificial Sequence
  Description of Artificial Sequence: Synthetic oligonucleotide
ctttgtggaatagaa

SEQ ID NO: 2219 - DNA, 15 bp, Artificial Sequence
  Description of Artificial Sequence: Synthetic oligonucleotide
taaatggattaaggg

SEQ ID NO: 2220 - DNA, 15 bp, Artificial Sequence
  Description of Artificial Sequence: Synthetic oligonucleotide
tcggctcactgcaac

SEQ ID NO: 2221 - DNA, 15 bp, Artificial Sequence
  Description of Artificial Sequence: Synthetic oligonucleotide
ctcatgcggagccga

SEQ ID NO: 2222 - DNA, 15 bp, Artificial Sequence
  Description of Artificial Sequence: Synthetic oligonucleotide
gctacaaccacctcc

SEQ ID NO: 2223 - DNA, 15 bp, Artificial Sequence
  Description of Artificial Sequence: Synthetic oligonucleotide
ctgcctcggcctgcc

SEQ ID NO: 2224 - DNA, 15 bp, Artificial Sequence
  Description of Artificial Sequence: Synthetic oligonucleotide
cggccagccgccccg

SEQ ID NO: 2225 - DNA, 15 bp, Artificial Sequence
  Description of Artificial Sequence: Synthetic oligonucleotide
ttgatctgtgacctt

SEQ ID NO: 2226 - DNA, 15 bp, Artificial Sequence
  Description of Artificial Sequence: Synthetic oligonucleotide
agaaatcggattgtt

SEQ ID NO: 2227 - DNA, 15 bp, Artificial Sequence
  Description of Artificial Sequence: Synthetic oligonucleotide
aacacccaagaatta

SEQ ID NO: 2228 - DNA, 15 bp, Artificial Sequence
  Description of Artificial Sequence: Synthetic oligonucleotide
cgccatcccgtctag

SEQ ID NO: 2229 - DNA, 15 bp, Artificial Sequence
  Description of Artificial Sequence: Synthetic oligonucleotide
gatgcttgaaggcag

SEQ ID NO: 2230 - DNA, 15 bp, Artificial Sequence
  Description of Artificial Sequence: Synthetic oligonucleotide
ggctcgctgcaacct

SEQ ID NO: 2231 - DNA, 15 bp, Artificial Sequence
  Description of Artificial Sequence: Synthetic oligonucleotide
gatagagaaatcgga

SEQ ID NO: 2232 - DNA, 15 bp, Artificial Sequence
  Description of Artificial Sequence: Synthetic oligonucleotide
tccgggaggtggggg

SEQ ID NO: 2233 - DNA, 15 bp, Artificial Sequence
  Description of Artificial Sequence: Synthetic oligonucleotide
gagacggggtttcgc

SEQ ID NO: 2234 - DNA, 15 bp, Artificial Sequence
  Description of Artificial Sequence: Synthetic oligonucleotide
tgccttgggatgctg

SEQ ID NO: 2235 - DNA, 15 bp, Artificial Sequence
  Description of Artificial Sequence: Synthetic oligonucleotide
gagcgcctccgcccg

SEQ ID NO: 2236 - DNA, 15 bp, Artificial Sequence
  Description of Artificial Sequence: Synthetic oligonucleotide
ctgggaggtgagggg

SEQ ID NO: 2237 - DNA, 15 bp, Artificial Sequence
  Description of Artificial Sequence: Synthetic oligonucleotide
tgtagaaagaggtag

SEQ ID NO: 2238 - DNA, 15 bp, Artificial Sequence
  Description of Artificial Sequence: Synthetic oligonucleotide
atccccctctgcgag

SEQ ID NO: 2239 - DNA, 15 bp, Artificial Sequence
  Description of Artificial Sequence: Synthetic oligonucleotide
gccatgatgacaatg

SEQ ID NO: 2240 - DNA, 15 bp, Artificial Sequence
  Description of Artificial Sequence: Synthetic oligonucleotide
aatcggatggttgcc

SEQ ID NO: 2241 - DNA, 15 bp, Artificial Sequence
  Description of Artificial Sequence: Synthetic oligonucleotide
taaaaaaaattaaaa

SEQ ID NO: 2242 - DNA, 15 bp, Artificial Sequence
  Description of Artificial Sequence: Synthetic oligonucleotide
cctctgatgccgagc

SEQ ID NO: 2243 - DNA, 15 bp, Artificial Sequence
  Description of Artificial Sequence: Synthetic oligonucleotide
tttgttcacgtgttt

SEQ ID NO: 2244 - DNA, 15 bp, Artificial Sequence
  Description of Artificial Sequence: Synthetic oligonucleotide
gcgcctccgcccggc

SEQ ID NO: 2245 - DNA, 15 bp, Artificial Sequence
  Description of Artificial Sequence: Synthetic oligonucleotide
cccggccagccgccc

SEQ ID NO: 2246 - DNA, 15 bp, Artificial Sequence
  Description of Artificial Sequence: Synthetic oligonucleotide
tccccctctccgaga

SEQ ID NO: 2247 - DNA, 15 bp, Artificial Sequence
  Description of Artificial Sequence: Synthetic oligonucleotide
aagtagacataggag

SEQ ID NO: 2248 - DNA, 15 bp, Artificial Sequence
  Description of Artificial Sequence: Synthetic oligonucleotide
gacggagtctcgttc

SEQ ID NO: 2249 - DNA, 15 bp, Artificial Sequence
  Description of Artificial Sequence: Synthetic oligonucleotide
tgccgggattgcaga

SEQ ID NO: 2250 - DNA, 15 bp, Artificial Sequence
  Description of Artificial Sequence: Synthetic oligonucleotide
ggtgctgggattgca

SEQ ID NO: 2251 - DNA, 15 bp, Artificial Sequence
  Description of Artificial Sequence: Synthetic oligonucleotide
ctcagtgctcaatgt

SEQ ID NO: 2252 - DNA, 15 bp, Artificial Sequence
  Description of Artificial Sequence: Synthetic oligonucleotide
gtcgaaaagaaaagg

SEQ ID NO: 2253 - DNA, 15 bp, Artificial Sequence
  Description of Artificial Sequence: Synthetic oligonucleotide
tggggaaaagaaaga

SEQ ID NO: 2254 - DNA, 15 bp, Artificial Sequence
  Description of Artificial Sequence: Synthetic oligonucleotide
tggggaaaaaattga

SEQ ID NO: 2255 - DNA, 15 bp, Artificial Sequence
  Description of Artificial Sequence: Synthetic oligonucleotide
tttttggtggagacg

SEQ ID NO: 2256 - DNA, 15 bp, Artificial Sequence
  Description of Artificial Sequence: Synthetic oligonucleotide
aataaaaaaaaaaaa

SEQ ID NO: 2257 - DNA, 15 bp, Artificial Sequence
  Description of Artificial Sequence: Synthetic oligonucleotide
agcatgctcgttaag

SEQ ID NO: 2258 - DNA, 15 bp, Artificial Sequence
  Description of Artificial Sequence: Synthetic oligonucleotide
cggccgcccctactg

SEQ ID NO: 2259 - DNA, 15 bp, Artificial Sequence
  Description of Artificial Sequence: Synthetic oligonucleotide
agaattatcaataaa

SEQ ID NO: 2260 - DNA, 15 bp, Artificial Sequence
  Description of Artificial Sequence: Synthetic oligonucleotide
taaacagatgcttga

SEQ ID NO: 2261 - DNA, 15 bp, Artificial Sequence
  Description of Artificial Sequence: Synthetic oligonucleotide
ctgggatgtgaggag

SEQ ID NO: 2262 - DNA, 15 bp, Artificial Sequence
  Description of Artificial Sequence: Synthetic oligonucleotide
cttggcctcccaaag

SEQ ID NO: 2263 - DNA, 15 bp, Artificial Sequence
  Description of Artificial Sequence: Synthetic oligonucleotide
gacgatggcggtttt

SEQ ID NO: 2264 - DNA, 15 bp, Artificial Sequence
  Description of Artificial Sequence: Synthetic oligonucleotide
ttgtcgaatagaaaa

SEQ ID NO: 2265 - DNA, 15 bp, Artificial Sequence
  Description of Artificial Sequence: Synthetic oligonucleotide
gcccggccgcccatc

SEQ ID NO: 2266 - DNA, 15 bp, Artificial Sequence
  Description of Artificial Sequence: Synthetic oligonucleotide
cggaaggccgcaggg

SEQ ID NO: 2267 - DNA, 15 bp, Artificial Sequence
  Description of Artificial Sequence: Synthetic oligonucleotide
ccatgaccctgccaa

SEQ ID NO: 2268 - DNA, 15 bp, Artificial Sequence
  Description of Artificial Sequence: Synthetic oligonucleotide
actattgtcctatga

SEQ ID NO: 2269 - DNA, 15 bp, Artificial Sequence
  Description of Artificial Sequence: Synthetic oligonucleotide
ctctgcctggctgcc

SEQ ID NO: 2270 - DNA, 15 bp, Artificial Sequence
  Description of Artificial Sequence: Synthetic oligonucleotide
gtgcaagatgtgctt

SEQ ID NO: 2271 - DNA, 15 bp, Artificial Sequence
  Description of Artificial Sequence: Synthetic oligonucleotide
gattgttgctgtgtc

SEQ ID NO: 2272 - DNA, 15 bp, Artificial Sequence
  Description of Artificial Sequence: Synthetic oligonucleotide
cctctgcccggccac

SEQ ID NO: 2273 - DNA, 15 bp, Artificial Sequence
  Description of Artificial Sequence: Synthetic oligonucleotide
ctacaacctacacct

SEQ ID NO: 2274 - DNA, 15 bp, Artificial Sequence
  Description of Artificial Sequence: Synthetic oligonucleotide
atcggatggttgccg

SEQ ID NO: 2275 - DNA, 15 bp, Artificial Sequence
  Description of Artificial Sequence: Synthetic oligonucleotide
ctctgcccggccacc

SEQ ID NO: 2276 - DNA, 15 bp, Artificial Sequence
  Description of Artificial Sequence: Synthetic oligonucleotide
tctgaaacatgtgct

SEQ ID NO: 2277 - DNA, 15 bp, Artificial Sequence
  Description of Artificial Sequence: Synthetic oligonucleotide
ccatcccatctagga

SEQ ID NO: 2278 - DNA, 15 bp, Artificial Sequence
  Description of Artificial Sequence: Synthetic oligonucleotide
cccggccgcccagtc

SEQ ID NO: 2279 - DNA, 15 bp, Artificial Sequence
  Description of Artificial Sequence: Synthetic oligonucleotide
ctgcccgcctcggcc

SEQ ID NO: 2280 - DNA, 15 bp, Artificial Sequence
  Description of Artificial Sequence: Synthetic oligonucleotide
ccggccgccatcccg

SEQ ID NO: 2281 - DNA, 15 bp, Artificial Sequence
  Description of Artificial Sequence: Synthetic oligonucleotide
tctgggaggaggtgg

SEQ ID NO: 2282 - DNA, 15 bp, Artificial Sequence
  Description of Artificial Sequence: Synthetic oligonucleotide
gccaccgccccgtct

SEQ ID NO: 2283 - DNA, 15 bp, Artificial Sequence
  Description of Artificial Sequence: Synthetic oligonucleotide
cttgggatcctgttg

SEQ ID NO: 2284 - DNA, 15 bp, Artificial Sequence
  Description of Artificial Sequence: Synthetic oligonucleotide
tgaggagcgtctctg

SEQ ID NO: 2285 - DNA, 15 bp, Artificial Sequence
  Description of Artificial Sequence: Synthetic oligonucleotide
cgcgccgccacgcct

SEQ ID NO: 2286 - DNA, 15 bp, Artificial Sequence
  Description of Artificial Sequence: Synthetic oligonucleotide
gaaggcagcatgctc

SEQ ID NO: 2287 - DNA, 15 bp, Artificial Sequence
  Description of Artificial Sequence: Synthetic oligonucleotide
ccgccatctcggctc

SEQ ID NO: 2288 - DNA, 15 bp, Artificial Sequence
  Description of Artificial Sequence: Synthetic oligonucleotide
cagggttaaatggat

SEQ ID NO: 2289 - DNA, 15 bp, Artificial Sequence
  Description of Artificial Sequence: Synthetic oligonucleotide
ggaggaggtgggggg

SEQ ID NO: 2290 - DNA, 15 bp, Artificial Sequence
  Description of Artificial Sequence: Synthetic oligonucleotide
ctattatcctatgac

SEQ ID NO: 2291 - DNA, 15 bp, Artificial Sequence
  Description of Artificial Sequence: Synthetic oligonucleotide
cgctgtgttggccgg

SEQ ID NO: 2292 - DNA, 15 bp, Artificial Sequence
  Description of Artificial Sequence: Synthetic oligonucleotide
gctcgctacaacctc

SEQ ID NO: 2293 - DNA, 15 bp, Artificial Sequence
  Description of Artificial Sequence: Synthetic oligonucleotide
gctcgctacaaccta

SEQ ID NO: 2294 - DNA, 15 bp, Artificial Sequence
  Description of Artificial Sequence: Synthetic oligonucleotide
tagagaaatcggatt

SEQ ID NO: 2295 - DNA, 15 bp, Artificial Sequence
  Description of Artificial Sequence: Synthetic oligonucleotide
tctgcccgcctcggc

SEQ ID NO: 2296 - DNA, 15 bp, Artificial Sequence
  Description of Artificial Sequence: Synthetic oligonucleotide
aacagctcattgaga

SEQ ID NO: 2297 - DNA, 15 bp, Artificial Sequence
  Description of Artificial Sequence: Synthetic oligonucleotide
ccgtctgggatgtga

SEQ ID NO: 2298 - DNA, 15 bp, Artificial Sequence
  Description of Artificial Sequence: Synthetic oligonucleotide
ctgccgagtgcctgg

SEQ ID NO: 2299 - DNA, 15 bp, Artificial Sequence
  Description of Artificial Sequence: Synthetic oligonucleotide
ggtggggggcgcctc

SEQ ID NO: 2300 - DNA, 15 bp, Artificial Sequence
  Description of Artificial Sequence: Synthetic oligonucleotide
ctctcccctctttct

SEQ ID NO: 2301 - DNA, 15 bp, Artificial Sequence
  Description of Artificial Sequence: Synthetic oligonucleotide
gaacgggccatgatg

SEQ ID NO: 2302 - DNA, 15 bp, Artificial Sequence
  Description of Artificial Sequence: Synthetic oligonucleotide
ggaaggccgcagggt

SEQ ID NO: 2303 - DNA, 15 bp, Artificial Sequence
  Description of Artificial Sequence: Synthetic oligonucleotide
atctgcccgcctcgg

SEQ ID NO: 2304 - DNA, 15 bp, Artificial Sequence
  Description of Artificial Sequence: Synthetic oligonucleotide
acatccccctctccg

SEQ ID NO: 2305 - DNA, 15 bp, Artificial Sequence
  Description of Artificial Sequence: Synthetic oligonucleotide
ctctcccctctttcc

SEQ ID NO: 2306 - DNA, 15 bp, Artificial Sequence
  Description of Artificial Sequence: Synthetic oligonucleotide
agccgccccgtctgg

SEQ ID NO: 2307 - DNA, 15 bp, Artificial Sequence
  Description of Artificial Sequence: Synthetic oligonucleotide
caaagtgctaagatt

SEQ ID NO: 2308 - DNA, 15 bp, Artificial Sequence
  Description of Artificial Sequence: Synthetic oligonucleotide
ggaaggccgcaggga

SEQ ID NO: 2309 - DNA, 15 bp, Artificial Sequence
  Description of Artificial Sequence: Synthetic oligonucleotide
cacggtctccctctc

SEQ ID NO: 2310 - DNA, 15 bp, Artificial Sequence
  Description of Artificial Sequence: Synthetic oligonucleotide
accttatccccaacc

SEQ ID NO: 2311 - DNA, 15 bp, Artificial Sequence
  Description of Artificial Sequence: Synthetic oligonucleotide
ggtgcaagatgtgct

SEQ ID NO: 2312 - DNA, 15 bp, Artificial Sequence
  Description of Artificial Sequence: Synthetic oligonucleotide
acctttgttcacgtg

SEQ ID NO: 2313 - DNA, 15 bp, Artificial Sequence
  Description of Artificial Sequence: Synthetic oligonucleotide
tgtccactcagggtt

SEQ ID NO: 2314 - DNA, 15 bp, Artificial Sequence
  Description of Artificial Sequence: Synthetic oligonucleotide
gccgcagggtcctct

SEQ ID NO: 2315 - DNA, 15 bp, Artificial Sequence
  Description of Artificial Sequence: Synthetic oligonucleotide
ccggccgcccctact

SEQ ID NO: 2316 - DNA, 15 bp, Artificial Sequence
  Description of Artificial Sequence: Synthetic oligonucleotide
tgggaggtgtgccca

SEQ ID NO: 2317 - DNA, 15 bp, Artificial Sequence
  Description of Artificial Sequence: Synthetic oligonucleotide
gcgcgccgccacgcc

SEQ ID NO: 2318 - DNA, 15 bp, Artificial Sequence
  Description of Artificial Sequence: Synthetic oligonucleotide
cctggctgcccagtc

SEQ ID NO: 2319 - DNA, 15 bp, Artificial Sequence
  Description of Artificial Sequence: Synthetic oligonucleotide
ctgggaggaggtggg

SEQ ID NO: 2320 - DNA, 15 bp, Artificial Sequence
  Description of Artificial Sequence: Synthetic oligonucleotide
atctaggaagtgagg

SEQ ID NO: 2321 - DNA, 15 bp, Artificial Sequence
  Description of Artificial Sequence: Synthetic oligonucleotide
gtgcccaacagctca

SEQ ID NO: 2322 - DNA, 15 bp, Artificial Sequence
  Description of Artificial Sequence: Synthetic oligonucleotide
actcagtgctcaatg

SEQ ID NO: 2323 - DNA, 15 bp, Artificial Sequence
  Description of Artificial Sequence: Synthetic oligonucleotide
atgtgctgtgtcaac

SEQ ID NO: 2324 - DNA, 15 bp, Artificial Sequence
  Description of Artificial Sequence: Synthetic oligonucleotide
ccgccccgtctggga

SEQ ID NO: 2325 - DNA, 15 bp, Artificial Sequence
  Description of Artificial Sequence: Synthetic oligonucleotide
gtctggttcactcag

SEQ ID NO: 2326 - DNA, 15 bp, Artificial Sequence
  Description of Artificial Sequence: Synthetic oligonucleotide
tgtgtagaaagaagt

SEQ ID NO: 2327 - DNA, 15 bp, Artificial Sequence
  Description of Artificial Sequence: Synthetic oligonucleotide
tttttttttggtgga

SEQ ID NO: 2328 - DNA, 15 bp, Artificial Sequence
  Description of Artificial Sequence: Synthetic oligonucleotide
aaagaagtagacata

SEQ ID NO: 2329 - DNA, 15 bp, Artificial Sequence
  Description of Artificial Sequence: Synthetic oligonucleotide
ccatcccgtctagga

SEQ ID NO: 2330 - DNA, 15 bp, Artificial Sequence
  Description of Artificial Sequence: Synthetic oligonucleotide
aaagaagtagacatg

SEQ ID NO: 2331 - DNA, 15 bp, Artificial Sequence
  Description of Artificial Sequence: Synthetic oligonucleotide
gcccggccgccccta

SEQ ID NO: 2332 - DNA, 15 bp, Artificial Sequence
  Description of Artificial Sequence: Synthetic oligonucleotide
gagaaatcggattgt

SEQ ID NO: 2333 - DNA, 15 bp, Artificial Sequence
  Description of Artificial Sequence: Synthetic oligonucleotide
ccctctcccctcttt

SEQ ID NO: 2334 - DNA, 15 bp, Artificial Sequence
  Description of Artificial Sequence: Synthetic oligonucleotide
gatgtgctttgttaa

SEQ ID NO: 2335 - DNA, 15 bp, Artificial Sequence
  Description of Artificial Sequence: Synthetic oligonucleotide
atcagattgttactg

SEQ ID NO: 2336 - DNA, 15 bp, Artificial Sequence
  Description of Artificial Sequence: Synthetic oligonucleotide
gtgaggggcgcctct

SEQ ID NO: 2337 - DNA, 15 bp, Artificial Sequence
  Description of Artificial Sequence: Synthetic oligonucleotide
gaaagaagtagacat

SEQ ID NO: 2338 - DNA, 15 bp, Artificial Sequence
  Description of Artificial Sequence: Synthetic oligonucleotide
ctgcctcgggctcca

SEQ ID NO: 2339 - DNA, 15 bp, Artificial Sequence
  Description of Artificial Sequence: Synthetic oligonucleotide
tatttttggtggaga

SEQ ID NO: 2340 - DNA, 15 bp, Artificial Sequence
  Description of Artificial Sequence: Synthetic oligonucleotide
ccgcccatcgtctgg

SEQ ID NO: 2341 - DNA, 15 bp, Artificial Sequence
  Description of Artificial Sequence: Synthetic oligonucleotide
catctcggctcactg

SEQ ID NO: 2342 - DNA, 15 bp, Artificial Sequence
  Description of Artificial Sequence: Synthetic oligonucleotide
gactggtttttgtat

SEQ ID NO: 2343 - DNA, 15 bp, Artificial Sequence
  Description of Artificial Sequence: Synthetic oligonucleotide
aaaggtggggaaaag

SEQ ID NO: 2344 - DNA, 15 bp, Artificial Sequence
  Description of Artificial Sequence: Synthetic oligonucleotide
gatgacaatggcggc

SEQ ID NO: 2345 - DNA, 15 bp, Artificial Sequence
  Description of Artificial Sequence: Synthetic oligonucleotide
ctgggaggtgtaccc

SEQ ID NO: 2346 - DNA, 15 bp, Artificial Sequence
  Description of Artificial Sequence: Synthetic oligonucleotide
ggaatagaaaggggg

SEQ ID NO: 2347 - DNA, 15 bp, Artificial Sequence
  Description of Artificial Sequence: Synthetic oligonucleotide
gaaaaattcttctgc

SEQ ID NO: 2348 - DNA, 15 bp, Artificial Sequence
  Description of Artificial Sequence: Synthetic oligonucleotide
gatgacaatggcggt

SEQ ID NO: 2349 - DNA, 15 bp, Artificial Sequence
  Description of Artificial Sequence: Synthetic oligonucleotide
ctgcgagaaacaccc

SEQ ID NO: 2350 - DNA, 15 bp, Artificial Sequence
  Description of Artificial Sequence: Synthetic oligonucleotide
cctctcccctctctc

SEQ ID NO: 2351 - DNA, 15 bp, Artificial Sequence
  Description of Artificial Sequence: Synthetic oligonucleotide
acttttcattttgtt

SEQ ID NO: 2352 - DNA, 15 bp, Artificial Sequence
  Description of Artificial Sequence: Synthetic oligonucleotide
ctcagcctgccgagt

SEQ ID NO: 2353 - DNA, 15 bp, Artificial Sequence
  Description of Artificial Sequence: Synthetic oligonucleotide
ctcactcagtgctca

SEQ ID NO: 2354 - DNA, 15 bp, Artificial Sequence
  Description of Artificial Sequence: Synthetic oligonucleotide
gcagacggagtctgg

SEQ ID NO: 2355 - DNA, 15 bp, Artificial Sequence
  Description of Artificial Sequence: Synthetic oligonucleotide
ctctgccccgccgcc

SEQ ID NO: 2356 - DNA, 15 bp, Artificial Sequence
  Description of Artificial Sequence: Synthetic oligonucleotide
cacatgtttatctgc

SEQ ID NO: 2357 - DNA, 15 bp, Artificial Sequence
  Description of Artificial Sequence: Synthetic oligonucleotide
gttttggtggagacg

SEQ ID NO: 2358 - DNA, 15 bp, Artificial Sequence
  Description of Artificial Sequence: Synthetic oligonucleotide
ctcattggggatggg

SEQ ID NO: 2359 - DNA, 15 bp, Artificial Sequence
  Description of Artificial Sequence: Synthetic oligonucleotide
atccccctctgtgag

SEQ ID NO: 2360 - DNA, 15 bp, Artificial Sequence
  Description of Artificial Sequence: Synthetic oligonucleotide
gcccggccgccatcc

SEQ ID NO: 2361 - DNA, 15 bp, Artificial Sequence
  Description of Artificial Sequence: Synthetic oligonucleotide
tgtattttttggtgg

SEQ ID NO: 2362 - DNA, 15 bp, Artificial Sequence
  Description of Artificial Sequence: Synthetic oligonucleotide
ggcagcatgctcgtt

SEQ ID NO: 2363 - DNA, 15 bp, Artificial Sequence
  Description of Artificial Sequence: Synthetic oligonucleotide
ccagcggctcattgg

SEQ ID NO: 2364 - DNA, 15 bp, Artificial Sequence
  Description of Artificial Sequence: Synthetic oligonucleotide
gggggaaatgtgggg

SEQ ID NO: 2365 - DNA, 15 bp, Artificial Sequence
  Description of Artificial Sequence: Synthetic oligonucleotide
aggtggggggcgcct

SEQ ID NO: 2366 - DNA, 15 bp, Artificial Sequence
  Description of Artificial Sequence: Synthetic oligonucleotide
tcggcctgccgagtg

SEQ ID NO: 2367 - DNA, 15 bp, Artificial Sequence
  Description of Artificial Sequence: Synthetic oligonucleotide
cgggccggtctccag

SEQ ID NO: 2368 - DNA, 15 bp, Artificial Sequence
  Description of Artificial Sequence: Synthetic oligonucleotide
aagaaagagagatca

SEQ ID NO: 2369 - DNA, 15 bp, Artificial Sequence
  Description of Artificial Sequence: Synthetic oligonucleotide
ctaggaaaaccagag

SEQ ID NO: 2370 - DNA, 15 bp, Artificial Sequence
  Description of Artificial Sequence: Synthetic oligonucleotide
cgccgccccgtctgg

SEQ ID NO: 2371 - DNA, 15 bp, Artificial Sequence
  Description of Artificial Sequence: Synthetic oligonucleotide
ccctctgcctggctg

SEQ ID NO: 2372 - DNA, 15 bp, Artificial Sequence
  Description of Artificial Sequence: Synthetic oligonucleotide
ggggcgcctctgccc

SEQ ID NO: 2373 - DNA, 15 bp, Artificial Sequence
  Description of Artificial Sequence: Synthetic oligonucleotide
tgttcacttgtttat

SEQ ID NO: 2374 - DNA, 15 bp, Artificial Sequence
  Description of Artificial Sequence: Synthetic oligonucleotide
cttccctccactatt

SEQ ID NO: 2375 - DNA, 15 bp, Artificial Sequence
  Description of Artificial Sequence: Synthetic oligonucleotide
actaaaaaaaaaaaa

SEQ ID NO: 2376 - DNA, 15 bp, Artificial Sequence
  Description of Artificial Sequence: Synthetic oligonucleotide
aatggattaagggcg

SEQ ID NO: 2377 - DNA, 15 bp, Artificial Sequence
  Description of Artificial Sequence: Synthetic oligonucleotide
ctccctgcctgattc

SEQ ID NO: 2378 - DNA, 15 bp, Artificial Sequence
  Description of Artificial Sequence: Synthetic oligonucleotide
gatgctgttaatcta

SEQ ID NO: 2379 - DNA, 15 bp, Artificial Sequence
  Description of Artificial Sequence: Synthetic oligonucleotide
gaaaggcgggaaagg

SEQ ID NO: 2380 - DNA, 15 bp, Artificial Sequence
  Description of Artificial Sequence: Synthetic oligonucleotide
accccgtctgggaag

SEQ ID NO: 2381 - DNA, 15 bp, Artificial Sequence
  Description of Artificial Sequence: Synthetic oligonucleotide
ctggcctcgagtgat

SEQ ID NO: 2382 - DNA, 15 bp, Artificial Sequence
  Description of Artificial Sequence: Synthetic oligonucleotide
cgccgtgttggccgg

SEQ ID NO: 2383 - DNA, 15 bp, Artificial Sequence
  Description of Artificial Sequence: Synthetic oligonucleotide
cccagcggctcattg

SEQ ID NO: 2384 - DNA, 15 bp, Artificial Sequence
  Description of Artificial Sequence: Synthetic oligonucleotide
gtgctaagattgcag

SEQ ID NO: 2385 - DNA, 15 bp, Artificial Sequence
  Description of Artificial Sequence: Synthetic oligonucleotide
agggacacaaacact

SEQ ID NO: 2386 - DNA, 15 bp, Artificial Sequence
  Description of Artificial Sequence: Synthetic oligonucleotide
atgctcgttaagagt

SEQ ID NO: 2387 - DNA, 15 bp, Artificial Sequence
  Description of Artificial Sequence: Synthetic oligonucleotide
aggtgtgcccaacag

SEQ ID NO: 2388 - DNA, 15 bp, Artificial Sequence
  Description of Artificial Sequence: Synthetic oligonucleotide
ttttgtcgaaaagaa

SEQ ID NO: 2389 - DNA, 15 bp, Artificial Sequence
  Description of Artificial Sequence: Synthetic oligonucleotide
cggccgcccagtctg

SEQ ID NO: 2390 - DNA, 15 bp, Artificial Sequence
  Description of Artificial Sequence: Synthetic oligonucleotide
ctctgatgccgagcc

SEQ ID NO: 2391 - DNA, 15 bp, Artificial Sequence
  Description of Artificial Sequence: Synthetic oligonucleotide
ccttgggatgctgtt

SEQ ID NO: 2392 - DNA, 15 bp, Artificial Sequence
  Description of Artificial Sequence: Synthetic oligonucleotide
ctccctaatcttaag

SEQ ID NO: 2393 - DNA, 15 bp, Artificial Sequence
  Description of Artificial Sequence: Synthetic oligonucleotide
atccccctctccgag

SEQ ID NO: 2394 - DNA, 15 bp, Artificial Sequence
  Description of Artificial Sequence: Synthetic oligonucleotide
gcctggccgcccagt

SEQ ID NO: 2395 - DNA, 15 bp, Artificial Sequence
  Description of Artificial Sequence: Synthetic oligonucleotide
ttgagaaatcggatg

SEQ ID NO: 2396 - DNA, 15 bp, Artificial Sequence
  Description of Artificial Sequence: Synthetic oligonucleotide
agaaagaagtagaca

SEQ ID NO: 2397 - DNA, 15 bp, Artificial Sequence
  Description of Artificial Sequence: Synthetic oligonucleotide
gcccggccgccaccc

SEQ ID NO: 2398 - DNA, 15 bp, Artificial Sequence
  Description of Artificial Sequence: Synthetic oligonucleotide
cccgaggtgctggga

SEQ ID NO: 2399 - DNA, 15 bp, Artificial Sequence
  Description of Artificial Sequence: Synthetic oligonucleotide
ggggggcgcctctgc

SEQ ID NO: 2400 - DNA, 15 bp, Artificial Sequence
  Description of Artificial Sequence: Synthetic oligonucleotide
gtggatagaagtaga

SEQ ID NO: 2401 - DNA, 15 bp, Artificial Sequence
  Description of Artificial Sequence: Synthetic oligonucleotide
ccggccgcccatcgt

SEQ ID NO: 2402 - DNA, 15 bp, Artificial Sequence
  Description of Artificial Sequence: Synthetic oligonucleotide
tctcaagtacccagg

SEQ ID NO: 2403 - DNA, 15 bp, Artificial Sequence
  Description of Artificial Sequence: Synthetic oligonucleotide
tttcgtttttttttg

SEQ ID NO: 2404 - DNA, 15 bp, Artificial Sequence
  Description of Artificial Sequence: Synthetic oligonucleotide
gtttcgccgtgttgg

SEQ ID NO: 2405 - DNA, 15 bp, Artificial Sequence
  Description of Artificial Sequence: Synthetic oligonucleotide
cggctcgctgcaacc

SEQ ID NO: 2406 - DNA, 15 bp, Artificial Sequence
  Description of Artificial Sequence: Synthetic oligonucleotide
ccgtgctctctgaaa

SEQ ID NO: 2407 - DNA, 15 bp, Artificial Sequence
  Description of Artificial Sequence: Synthetic oligonucleotide
gcctgactggttttg

SEQ ID NO: 2408 - DNA, 15 bp, Artificial Sequence
  Description of Artificial Sequence: Synthetic oligonucleotide
gcctgactggttttc

SEQ ID NO: 2409 - DNA, 15 bp, Artificial Sequence
  Description of Artificial Sequence: Synthetic oligonucleotide
gttaaacagatgctt

SEQ ID NO: 2410 - DNA, 15 bp, Artificial Sequence
  Description of Artificial Sequence: Synthetic oligonucleotide
ggagactccattttg

SEQ ID NO: 2411 - DNA, 15 bp, Artificial Sequence
  Description of Artificial Sequence: Synthetic oligonucleotide
gccgggctggtctcc

SEQ ID NO: 2412 - DNA, 15 bp, Artificial Sequence
  Description of Artificial Sequence: Synthetic oligonucleotide
gcctgactggttttt

SEQ ID NO: 2413 - DNA, 15 bp, Artificial Sequence
  Description of Artificial Sequence: Synthetic oligonucleotide
agaaaggggggaaag

SEQ ID NO: 2414 - DNA, 15 bp, Artificial Sequence
  Description of Artificial Sequence: Synthetic oligonucleotide
ggatgctgttaatct

SEQ ID NO: 2415 - DNA, 15 bp, Artificial Sequence
  Description of Artificial Sequence: Synthetic oligonucleotide
tccagtgattctcct

SEQ ID NO: 2416 - DNA, 15 bp, Artificial Sequence
  Description of Artificial Sequence: Synthetic oligonucleotide
gaagtagacatggga

SEQ ID NO: 2417 - DNA, 15 bp, Artificial Sequence
  Description of Artificial Sequence: Synthetic oligonucleotide
ttcgtttttttttgg

SEQ ID NO: 2418 - DNA, 15 bp, Artificial Sequence
  Description of Artificial Sequence: Synthetic oligonucleotide
ccccgtctgggatgt

SEQ ID NO: 2419 - DNA, 15 bp, Artificial Sequence
  Description of Artificial Sequence: Synthetic oligonucleotide
tactgctgccatctc

SEQ ID NO: 2420 - DNA, 15 bp, Artificial Sequence
  Description of Artificial Sequence: Synthetic oligonucleotide
aggtgggggggtcag

SEQ ID NO: 2421 - DNA, 15 bp, Artificial Sequence
  Description of Artificial Sequence: Synthetic oligonucleotide
gattgcagacggagt

SEQ ID NO: 2422 - DNA, 15 bp, Artificial Sequence
  Description of Artificial Sequence: Synthetic oligonucleotide
caggatgacaatggc

SEQ ID NO: 2423 - DNA, 15 bp, Artificial Sequence
  Description of Artificial Sequence: Synthetic oligonucleotide
actattgtcccatga

SEQ ID NO: 2424 - DNA, 15 bp, Artificial Sequence
  Description of Artificial Sequence: Synthetic oligonucleotide
agctcctaaccgcga

SEQ ID NO: 2425 - DNA, 15 bp, Artificial Sequence
  Description of Artificial Sequence: Synthetic oligonucleotide
cgattgcaggcacgc

SEQ ID NO: 2426 - DNA, 15 bp, Artificial Sequence
  Description of Artificial Sequence: Synthetic oligonucleotide
tccctctcccctctc

SEQ ID NO: 2427 - DNA, 15 bp, Artificial Sequence
  Description of Artificial Sequence: Synthetic oligonucleotide
ccattgagaacgggc

SEQ ID NO: 2428 - DNA, 15 bp, Artificial Sequence
  Description of Artificial Sequence: Synthetic oligonucleotide
gttcacgtgtttatc

SEQ ID NO: 2429 - DNA, 15 bp, Artificial Sequence
  Description of Artificial Sequence: Synthetic oligonucleotide
tccctctcccctctt

SEQ ID NO: 2430 - DNA, 15 bp, Artificial Sequence
  Description of Artificial Sequence: Synthetic oligonucleotide
gactgtactgccgtg

SEQ ID NO: 2431 - DNA, 15 bp, Artificial Sequence
  Description of Artificial Sequence: Synthetic oligonucleotide
atcctatgaccctgc

SEQ ID NO: 2432 - DNA, 15 bp, Artificial Sequence
  Description of Artificial Sequence: Synthetic oligonucleotide
ttgggatcctgttga

SEQ ID NO: 2433 - DNA, 15 bp, Artificial Sequence
  Description of Artificial Sequence: Synthetic oligonucleotide
tcggcctcccgaggt

SEQ ID NO: 2434 - DNA, 15 bp, Artificial Sequence
  Description of Artificial Sequence: Synthetic oligonucleotide
tgtcaactcagggtt

SEQ ID NO: 2435 - DNA, 15 bp, Artificial Sequence
  Description of Artificial Sequence: Synthetic oligonucleotide
cttacccccaaccct

SEQ ID NO: 2436 - DNA, 15 bp, Artificial Sequence
  Description of Artificial Sequence: Synthetic oligonucleotide
tgctcgttaagagtc

SEQ ID NO: 2437 - DNA, 15 bp, Artificial Sequence
  Description of Artificial Sequence: Synthetic oligonucleotide
agggtggggaaaaaa

SEQ ID NO: 2438 - DNA, 15 bp, Artificial Sequence
  Description of Artificial Sequence: Synthetic oligonucleotide
ctcaatggtgcccag

SEQ ID NO: 2439 - DNA, 15 bp, Artificial Sequence
  Description of Artificial Sequence: Synthetic oligonucleotide
tttccacggtctccc

SEQ ID NO: 2440 - DNA, 15 bp, Artificial Sequence
  Description of Artificial Sequence: Synthetic oligonucleotide
gccgtgtctgtgtag

SEQ ID NO: 2441 - DNA, 15 bp, Artificial Sequence
  Description of Artificial Sequence: Synthetic oligonucleotide
ggatcctgttgatct

SEQ ID NO: 2442 - DNA, 15 bp, Artificial Sequence
  Description of Artificial Sequence: Synthetic oligonucleotide
tccctgcctgattct

SEQ ID NO: 2443 - DNA, 15 bp, Artificial Sequence
  Description of Artificial Sequence: Synthetic oligonucleotide
ctccctctgttgccg

SEQ ID NO: 2444 - DNA, 15 bp, Artificial Sequence
  Description of Artificial Sequence: Synthetic oligonucleotide
aggagcgcctctgcc

SEQ ID NO: 2445 - DNA, 15 bp, Artificial Sequence
  Description of Artificial Sequence: Synthetic oligonucleotide
agaaaggcgggaagg

SEQ ID NO: 2446 - DNA, 15 bp, Artificial Sequence
  Description of Artificial Sequence: Synthetic oligonucleotide
gccgccccgtctggg

SEQ ID NO: 2447 - DNA, 15 bp, Artificial Sequence
  Description of Artificial Sequence: Synthetic oligonucleotide
ccgtctgggaggtgg

SEQ ID NO: 2448 - DNA, 15 bp, Artificial Sequence
  Description of Artificial Sequence: Synthetic oligonucleotide
ccgtctgggaagtga

SEQ ID NO: 2449 - DNA, 15 bp, Artificial Sequence
  Description of Artificial Sequence: Synthetic oligonucleotide
gacggggtttcgctg

SEQ ID NO: 2450 - DNA, 15 bp, Artificial Sequence
  Description of Artificial Sequence: Synthetic oligonucleotide
cagtgctcaatggtg

SEQ ID NO: 2451 - DNA, 15 bp, Artificial Sequence
  Description of Artificial Sequence: Synthetic oligonucleotide
tcctgaccgcgagtg

SEQ ID NO: 2452 - DNA, 15 bp, Artificial Sequence
  Description of Artificial Sequence: Synthetic oligonucleotide
cctccactattgtcc

SEQ ID NO: 2453 - DNA, 15 bp, Artificial Sequence
  Description of Artificial Sequence: Synthetic oligonucleotide
tgtctgtgtagaaag

SEQ ID NO: 2454 - DNA, 15 bp, Artificial Sequence
  Description of Artificial Sequence: Synthetic oligonucleotide
ctgtgtggatagaag

SEQ ID NO: 2455 - DNA, 15 bp, Artificial Sequence
  Description of Artificial Sequence: Synthetic oligonucleotide
ggaggtggggggcgc

SEQ ID NO: 2456 - DNA, 15 bp, Artificial Sequence
  Description of Artificial Sequence: Synthetic oligonucleotide
gcgattgcaggcacg

SEQ ID NO: 2457 - DNA, 15 bp, Artificial Sequence
  Description of Artificial Sequence: Synthetic oligonucleotide
tttgttctgtactaa

SEQ ID NO: 2458 - DNA, 15 bp, Artificial Sequence
  Description of Artificial Sequence: Synthetic oligonucleotide
gacttttcattttgt

SEQ ID NO: 2459 - DNA, 15 bp, Artificial Sequence
  Description of Artificial Sequence: Synthetic oligonucleotide
ccagctcctaaccgc

SEQ ID NO: 2460 - DNA, 15 bp, Artificial Sequence
  Description of Artificial Sequence: Synthetic oligonucleotide
gccgcccctactggg

SEQ ID NO: 2461 - DNA, 15 bp, Artificial Sequence
  Description of Artificial Sequence: Synthetic oligonucleotide
tggcctcccaaagag

SEQ ID NO: 2462 - DNA, 15 bp, Artificial Sequence
  Description of Artificial Sequence: Synthetic oligonucleotide
gtctgagatgtgggg

SEQ ID NO: 2463 - DNA, 15 bp, Artificial Sequence
  Description of Artificial Sequence: Synthetic oligonucleotide
gaggagcgtctctgc

SEQ ID NO: 2464 - DNA, 15 bp, Artificial Sequence
  Description of Artificial Sequence: Synthetic oligonucleotide
ctctgtgagaaacac

SEQ ID NO: 2465 - DNA, 15 bp, Artificial Sequence
  Description of Artificial Sequence: Synthetic oligonucleotide
ttgaaggcagcatgc

SEQ ID NO: 2466 - DNA, 15 bp, Artificial Sequence
  Description of Artificial Sequence: Synthetic oligonucleotide
gagccgaggctggac

SEQ ID NO: 2467 - DNA, 15 bp, Artificial Sequence
  Description of Artificial Sequence: Synthetic oligonucleotide
ctctgcgagaaacac

SEQ ID NO: 2468 - DNA, 15 bp, Artificial Sequence
  Description of Artificial Sequence: Synthetic oligonucleotide
ccgagattgcagcct

SEQ ID NO: 2469 - DNA, 15 bp, Artificial Sequence
  Description of Artificial Sequence: Synthetic oligonucleotide
gccaccaccccgtct

SEQ ID NO: 2470 - DNA, 15 bp, Artificial Sequence
  Description of Artificial Sequence: Synthetic oligonucleotide
cccggccgccccttc

SEQ ID NO: 2471 - DNA, 15 bp, Artificial Sequence
  Description of Artificial Sequence: Synthetic oligonucleotide
tgtcccatgaccctg

SEQ ID NO: 2472 - DNA, 15 bp, Artificial Sequence
  Description of Artificial Sequence: Synthetic oligonucleotide
aacctccctgcctga

SEQ ID NO: 2473 - DNA, 15 bp, Artificial Sequence
  Description of Artificial Sequence: Synthetic oligonucleotide
tctgtgaccttatcc

SEQ ID NO: 2474 - DNA, 15 bp, Artificial Sequence
  Description of Artificial Sequence: Synthetic oligonucleotide
cggcctcccgaggtg

SEQ ID NO: 2475 - DNA, 15 bp, Artificial Sequence
  Description of Artificial Sequence: Synthetic oligonucleotide
acaatggcggttttg

SEQ ID NO: 2476 - DNA, 15 bp, Artificial Sequence
  Description of Artificial Sequence: Synthetic oligonucleotide
cggagtctcgttcac

SEQ ID NO: 2477 - DNA, 15 bp, Artificial Sequence
  Description of Artificial Sequence: Synthetic oligonucleotide
cccgccgccccgtct

SEQ ID NO: 2478 - DNA, 15 bp, Artificial Sequence
  Description of Artificial Sequence: Synthetic oligonucleotide
ggagcacctctgccc

SEQ ID NO: 2479 - DNA, 15 bp, Artificial Sequence
  Description of Artificial Sequence: Synthetic oligonucleotide
ctggttcactcagtg

SEQ ID NO: 2480 - DNA, 15 bp, Artificial Sequence
  Description of Artificial Sequence: Synthetic oligonucleotide
tctctccacggtctc

SEQ ID NO: 2481 - DNA, 15 bp, Artificial Sequence
  Description of Artificial Sequence: Synthetic oligonucleotide
gaatagaaaggcggg

SEQ ID NO: 2482 - DNA, 15 bp, Artificial Sequence
  Description of Artificial Sequence: Synthetic oligonucleotide
gtgaggagcgcctcc

SEQ ID NO: 2483 - DNA, 15 bp, Artificial Sequence
  Description of Artificial Sequence: Synthetic oligonucleotide
cgccaccccgtctgg

SEQ ID NO: 2484 - DNA, 15 bp, Artificial Sequence
  Description of Artificial Sequence: Synthetic oligonucleotide
caacctacacctccc

SEQ ID NO: 2485 - DNA, 15 bp, Artificial Sequence
  Description of Artificial Sequence: Synthetic oligonucleotide
cccgtctgggaggag

SEQ ID NO: 2486 - DNA, 15 bp, Artificial Sequence
  Description of Artificial Sequence: Synthetic oligonucleotide
ctccactattgtccc

SEQ ID NO: 2487 - DNA, 15 bp, Artificial Sequence
  Description of Artificial Sequence: Synthetic oligonucleotide
gctgcccagtctggg

SEQ ID NO: 2488 - DNA, 15 bp, Artificial Sequence
  Description of Artificial Sequence: Synthetic oligonucleotide
actgggaagtgagga

SEQ ID NO: 2489 - DNA, 15 bp, Artificial Sequence
  Description of Artificial Sequence: Synthetic oligonucleotide
gtgaggagcgcctct

SEQ ID NO: 2490 - DNA, 15 bp, Artificial Sequence
  Description of Artificial Sequence: Synthetic oligonucleotide
ctccactattgtcct

SEQ ID NO: 2491 - DNA, 15 bp, Artificial Sequence
  Description of Artificial Sequence: Synthetic oligonucleotide
tgttgatctgtgacc

SEQ ID NO: 2492 - DNA, 15 bp, Artificial Sequence
  Description of Artificial Sequence: Synthetic oligonucleotide
tccctgcctcgggct

SEQ ID NO: 2493 - DNA, 15 bp, Artificial Sequence
  Description of Artificial Sequence: Synthetic oligonucleotide
aaaaattaaaaaaaa

SEQ ID NO: 2494 - DNA, 15 bp, Artificial Sequence
  Description of Artificial Sequence: Synthetic oligonucleotide
taagagtcatcacca

SEQ ID NO: 2495 - DNA, 15 bp, Artificial Sequence
  Description of Artificial Sequence: Synthetic oligonucleotide
gagacttttcatttt

SEQ ID NO: 2496 - DNA, 15 bp, Artificial Sequence
  Description of Artificial Sequence: Synthetic oligonucleotide
gacggggtttcgccg

SEQ ID NO: 2497 - DNA, 15 bp, Artificial Sequence
  Description of Artificial Sequence: Synthetic oligonucleotide
acataggagactcca

SEQ ID NO: 2498 - DNA, 15 bp, Artificial Sequence
  Description of Artificial Sequence: Synthetic oligonucleotide
ccccgtccgggagga

SEQ ID NO: 2499 - DNA, 15 bp, Artificial Sequence
  Description of Artificial Sequence: Synthetic oligonucleotide
gggaggtgtacccag

SEQ ID NO: 2500 - DNA, 15 bp, Artificial Sequence
  Description of Artificial Sequence: Synthetic oligonucleotide
gagtgcctgggattg

SEQ ID NO: 2501 - DNA, 15 bp, Artificial Sequence
  Description of Artificial Sequence: Synthetic oligonucleotide
ccctctcccctctct

SEQ ID NO: 2502 - DNA, 15 bp, Artificial Sequence
  Description of Artificial Sequence: Synthetic oligonucleotide
tgggccatgatgaca

SEQ ID NO: 2503 - DNA, 15 bp, Artificial Sequence
  Description of Artificial Sequence: Synthetic oligonucleotide
gccgagccaaagctg

SEQ ID NO: 2504 - DNA, 15 bp, Artificial Sequence
  Description of Artificial Sequence: Synthetic oligonucleotide
attatcaataaaaaa

SEQ ID NO: 2505 - DNA, 15 bp, Artificial Sequence
  Description of Artificial Sequence: Synthetic oligonucleotide
gcgagtgatccgcca

SEQ ID NO: 2506 - DNA, 15 bp, Artificial Sequence
  Description of Artificial Sequence: Synthetic oligonucleotide
gaaaggtggggaaaa

SEQ ID NO: 2507 - DNA, 15 bp, Artificial Sequence
  Description of Artificial Sequence: Synthetic oligonucleotide
ccccgtccgggaggt

SEQ ID NO: 2508 - DNA, 15 bp, Artificial Sequence
  Description of Artificial Sequence: Synthetic oligonucleotide
ggactgtactgccgt

SEQ ID NO: 2509 - DNA, 15 bp, Artificial Sequence
  Description of Artificial Sequence: Synthetic oligonucleotide
tcaactcagggttaa

SEQ ID NO: 2510 - DNA, 15 bp, Artificial Sequence
  Description of Artificial Sequence: Synthetic oligonucleotide
aaaaccagagacctt

SEQ ID NO: 2511 - DNA, 15 bp, Artificial Sequence
  Description of Artificial Sequence: Synthetic oligonucleotide
cccgtctgggaagtg

SEQ ID NO: 2512 - DNA, 15 bp, Artificial Sequence
  Description of Artificial Sequence: Synthetic oligonucleotide
gagagatcagattgt

SEQ ID NO: 2513 - DNA, 15 bp, Artificial Sequence
  Description of Artificial Sequence: Synthetic oligonucleotide
cctctccgagaaaca

SEQ ID NO: 2514 - DNA, 15 bp, Artificial Sequence
  Description of Artificial Sequence: Synthetic oligonucleotide
actgtgtctgtgtag

SEQ ID NO: 2515 - DNA, 15 bp, Artificial Sequence
  Description of Artificial Sequence: Synthetic oligonucleotide
ggactgtactgccgc

SEQ ID NO: 2516 - DNA, 15 bp, Artificial Sequence
  Description of Artificial Sequence: Synthetic oligonucleotide
gcttgaaggcagcat

SEQ ID NO: 2517 - DNA, 15 bp, Artificial Sequence
  Description of Artificial Sequence: Synthetic oligonucleotide
tgaggagcgcctccg

SEQ ID NO: 2518 - DNA, 15 bp, Artificial Sequence
  Description of Artificial Sequence: Synthetic oligonucleotide
tgctaagattgcagc

SEQ ID NO: 2519 - DNA, 15 bp, Artificial Sequence
  Description of Artificial Sequence: Synthetic oligonucleotide
tgaggggcgcctctg

SEQ ID NO: 2520 - DNA, 15 bp, Artificial Sequence
  Description of Artificial Sequence: Synthetic oligonucleotide
tccctctgatgccga

SEQ ID NO: 2521 - DNA, 15 bp, Artificial Sequence
  Description of Artificial Sequence: Synthetic oligonucleotide
tgagaacgggccagg

SEQ ID NO: 2522 - DNA, 15 bp, Artificial Sequence
  Description of Artificial Sequence: Synthetic oligonucleotide
tgccgtgatctcggc

SEQ ID NO: 2523 - DNA, 15 bp, Artificial Sequence
  Description of Artificial Sequence: Synthetic oligonucleotide
gaaacacccaagaat

SEQ ID NO: 2524 - DNA, 15 bp, Artificial Sequence
  Description of Artificial Sequence: Synthetic oligonucleotide
gcctaggaaaaccag

SEQ ID NO: 2525 - DNA, 15 bp, Artificial Sequence
  Description of Artificial Sequence: Synthetic oligonucleotide
ccagtgattctcctg

SEQ ID NO: 2526 - DNA, 15 bp, Artificial Sequence
  Description of Artificial Sequence: Synthetic oligonucleotide
ctggttttcgtattt

SEQ ID NO: 2527 - DNA, 15 bp, Artificial Sequence
  Description of Artificial Sequence: Synthetic oligonucleotide
ccatcgtctgggatg

SEQ ID NO: 2528 - DNA, 15 bp, Artificial Sequence
  Description of Artificial Sequence: Synthetic oligonucleotide
gaggtagacatggga

SEQ ID NO: 2529 - DNA, 15 bp, Artificial Sequence
  Description of Artificial Sequence: Synthetic oligonucleotide
tagacataggagact

SEQ ID NO: 2530 - DNA, 15 bp, Artificial Sequence
  Description of Artificial Sequence: Synthetic oligonucleotide
ctggttttcgttttt

SEQ ID NO: 2531 - DNA, 15 bp, Artificial Sequence
  Description of Artificial Sequence: Synthetic oligonucleotide
agacggagtctggtt

SEQ ID NO: 2532 - DNA, 15 bp, Artificial Sequence
  Description of Artificial Sequence: Synthetic oligonucleotide
accctgtgctctctg

SEQ ID NO: 2533 - DNA, 15 bp, Artificial Sequence
  Description of Artificial Sequence: Synthetic oligonucleotide
tgggagacttttcat

SEQ ID NO: 2534 - DNA, 15 bp, Artificial Sequence
  Description of Artificial Sequence: Synthetic oligonucleotide
tctctgaaacatgtg

SEQ ID NO: 2535 - DNA, 15 bp, Artificial Sequence
  Description of Artificial Sequence: Synthetic oligonucleotide
ggtactgctgccatc

SEQ ID NO: 2536 - DNA, 15 bp, Artificial Sequence
  Description of Artificial Sequence: Synthetic oligonucleotide
aaacatgtgctgtgt

SEQ ID NO: 2537 - DNA, 15 bp, Artificial Sequence
  Description of Artificial Sequence: Synthetic oligonucleotide
ggagcccctctgccc

SEQ ID NO: 2538 - DNA, 15 bp, Artificial Sequence
  Description of Artificial Sequence: Synthetic oligonucleotide
aaattgagaaatcgg

SEQ ID NO: 2539 - DNA, 15 bp, Artificial Sequence
  Description of Artificial Sequence: Synthetic oligonucleotide
acacctcccagccgc

SEQ ID NO: 2540 - DNA, 15 bp, Artificial Sequence
  Description of Artificial Sequence: Synthetic oligonucleotide
tggttgccgtgtctg

SEQ ID NO: 2541 - DNA, 15 bp, Artificial Sequence
  Description of Artificial Sequence: Synthetic oligonucleotide
cgagccaaagctgga

SEQ ID NO: 2542 - DNA, 15 bp, Artificial Sequence
  Description of Artificial Sequence: Synthetic oligonucleotide
cggagccgaagctgg

SEQ ID NO: 2543 - DNA, 15 bp, Artificial Sequence
  Description of Artificial Sequence: Synthetic oligonucleotide
gcccctctgcctggc

SEQ ID NO: 2544 - DNA, 15 bp, Artificial Sequence
  Description of Artificial Sequence: Synthetic oligonucleotide
gccgggattgcagac

SEQ ID NO: 2545 - DNA, 15 bp, Artificial Sequence
  Description of Artificial Sequence: Synthetic oligonucleotide
gtctccctctgatgc

SEQ ID NO: 2546 - DNA, 15 bp, Artificial Sequence
  Description of Artificial Sequence: Synthetic oligonucleotide
gtaatcagggacaca

SEQ ID NO: 2547 - DNA, 15 bp, Artificial Sequence
  Description of Artificial Sequence: Synthetic oligonucleotide
gtggggagcgcctct

SEQ ID NO: 2548 - DNA, 15 bp, Artificial Sequence
  Description of Artificial Sequence: Synthetic oligonucleotide
gcgagtgatctgccc

SEQ ID NO: 2549 - DNA, 15 bp, Artificial Sequence
  Description of Artificial Sequence: Synthetic oligonucleotide
ccgtctaggaagtga

SEQ ID NO: 2550 - DNA, 15 bp, Artificial Sequence
  Description of Artificial Sequence: Synthetic oligonucleotide
gttgccgggtctgtg

SEQ ID NO: 2551 - DNA, 15 bp, Artificial Sequence
  Description of Artificial Sequence: Synthetic oligonucleotide
gagaacgggccatga

SEQ ID NO: 2552 - DNA, 15 bp, Artificial Sequence
  Description of Artificial Sequence: Synthetic oligonucleotide
gttgatctgtgacct

SEQ ID NO: 2553 - DNA, 23 bp, Artificial Sequence
  Description of Artificial Sequence: Synthetic primer
cggtaggtgcaatattttagtcc

SEQ ID NO: 2554 - DNA, 23 bp, Artificial Sequence
  Description of Artificial Sequence: Synthetic primer
actgctggataaagcactctaaa

SEQ ID NO: 2555 - DNA, 20 bp, Artificial Sequence
  Description of Artificial Sequence: Synthetic primer
gcctgaaaagcttcgatgac

SEQ ID NO: 2556 - DNA, 20 bp, Artificial Sequence
  Description of Artificial Sequence: Synthetic primer
tggcaaaaactcaattggaa

SEQ ID NO: 2557 - DNA, 19 bp, Artificial Sequence
  Description of Artificial Sequence: Synthetic primer
caccgcccttaatccattt

SEQ ID NO: 2558 - DNA, 20 bp, Artificial Sequence
  Description of Artificial Sequence: Synthetic primer
aaggcagcatgctcgttaag

SEQ ID NO: 2559 - DNA, 20 bp, Artificial Sequence
  Description of Artificial Sequence: Synthetic primer
tcaacatccattcttgacca

SEQ ID NO: 2560 - DNA, 22 bp, Artificial Sequence
  Description of Artificial Sequence: Synthetic primer
caattttggtcaagaatggatg

SEQ ID NO: 2561 - DNA, 23 bp, Artificial Sequence
  Description of Artificial Sequence: Synthetic primer
ttccaataataagccctcaacaa

SEQ ID NO: 2562 - DNA, 24 bp, Artificial Sequence
  Description of Artificial Sequence: Synthetic primer
ccagtctaccctcagtatctagca

SEQ ID NO: 2563 - DNA, 22 bp, Artificial Sequence
  Description of Artificial Sequence: Synthetic primer
catgaggacatggtttgagtct

SEQ ID NO: 2564 - DNA, 18 bp, Artificial Sequence
  Description of Artificial Sequence: Synthetic primer
gcctggacaccactgagc

SEQ ID NO: 2565 - DNA, 20 bp, Artificial Sequence
  Description of Artificial Sequence: Synthetic primer
agggcagcatgctcgttgag

SEQ ID NO: 2566 - DNA, 27 bp, Artificial Sequence
  Description of Artificial Sequence: Synthetic primer
accagtttaataaaagaaacaagaatg

SEQ ID NO: 2567 - DNA, 20 bp, Artificial Sequence
  Description of Artificial Sequence: Synthetic primer
tgctggtgctacttcccttc

SEQ ID NO: 2568 - DNA, 20 bp, Artificial Sequence
  Description of Artificial Sequence: Synthetic primer
aacaagttccatggcaaaca

SEQ ID NO: 2569 - DNA, 20 bp, Artificial Sequence
  Description of Artificial Sequence: Synthetic primer
tcacatcccatgtcacacct

SEQ ID NO: 2570 - DNA, 20 bp, Artificial Sequence
  Description of Artificial Sequence: Synthetic primer
tatccacacagacccagcaa

SEQ ID NO: 2571 - DNA, 20 bp, Artificial Sequence
  Description of Artificial Sequence: Synthetic primer
ggagggaaggtcagcagata

SEQ ID NO: 2572 - DNA, 20 bp, Artificial Sequence
  Description of Artificial Sequence: Synthetic primer
ggcggttttgtggaatagaa

SEQ ID NO: 2573 - DNA, 18 bp, Artificial Sequence
  Description of Artificial Sequence: Synthetic oligonucleotide
ttagtgcttgttgagggc

SEQ ID NO: 2574 - DNA, 18 bp, Artificial Sequence
  Description of Artificial Sequence: Synthetic oligonucleotide
gttagtgcttgttgaggg

SEQ ID NO: 2575 - DNA, 18 bp, Artificial Sequence
  Description of Artificial Sequence: Synthetic oligonucleotide
tgttagtgcttgttgagg

SEQ ID NO: 2576 - DNA, 18 bp, Artificial Sequence
  Description of Artificial Sequence: Synthetic oligonucleotide
atgttagtgcttgttgag

SEQ ID NO: 2577 - DNA, 22 bp, Artificial Sequence
  Description of Artificial Sequence: Synthetic oligonucleotide
aatgttagtgcttgttgagggc

SEQ ID NO: 2578 - RNA, 28 nt, Artificial Sequence
  Description of Artificial Sequence: Synthetic oligonucleotide
agcuuuucaggcuuacauuuacucaucu

SEQ ID NO: 2579 - RNA, 22 nt, Artificial Sequence
  Description of Artificial Sequence: Synthetic oligonucleotide
aauguuagugcuuguugagggc

SEQ ID NO: 2580 - RNA, 21 nt, Artificial Sequence
  Description of Artificial Sequence: Synthetic oligonucleotide
cuagcauacaguaagcacaca

SEQ ID NO: 2581 - RNA, 24 nt, Artificial Sequence
  Description of Artificial Sequence: Synthetic oligonucleotide
cuuuaaaaugcuuuuaagguggua

SEQ ID NO: 2582 - RNA, 21 nt, Artificial Sequence
  Description of Artificial Sequence: Synthetic oligonucleotide
caggcuuacauuuacucaucu

SEQ ID NO: 2583 - RNA, 19 nt, Artificial Sequence
  Description of Artificial Sequence: Synthetic oligonucleotide
gucaucgaagcuuuucagg

SEQ ID NO: 2584 - RNA, 22 nt, Artificial Sequence
  Description of Artificial Sequence: Synthetic oligonucleotide
aauguuagugcuuguugagggc

SEQ ID NO: 2585 - DNA, 22 bp, Artificial Sequence
  Description of Artificial Sequence: Synthetic oligonucleotide
cgcgactatacgcgcaatatgc

SEQ ID NO: 2586 - DNA, 22 bp, Artificial Sequence
  Description of Artificial Sequence: Synthetic primer
tctcagcagtgtagggttttct

SEQ ID NO: 2587 - DNA, 22 bp, Artificial Sequence
  Description of Artificial Sequence: Synthetic primer
tggagcaggaaatgtagcagtt

SEQ ID NO: 2588 - DNA, 20 bp, Artificial Sequence
  Description of Artificial Sequence: Synthetic primer
tcacatcccatgtcacacct

SEQ ID NO: 2589 - DNA, 20 bp, Artificial Sequence
  Description of Artificial Sequence: Synthetic primer
cattcgaacgtctgccctat

SEQ ID NO: 2590 - DNA, 20 bp, Artificial Sequence
  Description of Artificial Sequence: Synthetic primer
caattacagggcctcgaaag

SEQ ID NO: 2591 - DNA, 20 bp, Artificial Sequence
  Description of Artificial Sequence: Synthetic primer
gagtcaacggatttggtcgt

SEQ ID NO: 2592 - DNA, 20 bp, Artificial Sequence
  Description of Artificial Sequence: Synthetic primer
ttgattttggagggatctcg

SEQ ID NO: 2593 - DNA, 21 bp, Artificial Sequence
  Description of Artificial Sequence: Synthetic primer
tgttagtgcttgttgagggct

SEQ ID NO: 2594 - DNA, 20 bp, Artificial Sequence
  Description of Artificial Sequence: Synthetic primer
attcccaggaaggcgctaag

SEQ ID NO: 2595 - DNA, 21 bp, Artificial Sequence
  Description of Artificial Sequence: Synthetic primer
agcatgtgtcaagcattaggt

SEQ ID NO: 2596 - DNA, 21 bp, Artificial Sequence
  Description of Artificial Sequence: Synthetic primer
agtgcttgttgagggcttatt

SEQ ID NO: 2597 - DNA, 28 bp, Artificial Sequence
  Description of Artificial Sequence: Synthetic probe
aggtccagatgagtaaatgtaagcctga

SEQ ID NO: 2598 - DNA, 24 bp, Artificial Sequence
  Description of Artificial Sequence: Synthetic primer
acataagcatgtgtcaagcattag

SEQ ID NO: 2599 - DNA, 20 bp, Artificial Sequence
  Description of Artificial Sequence: Synthetic primer
ccaggaaggcgctaagtaaa

SEQ ID NO: 2600 - DNA, 29 bp, Artificial Sequence
  Description of Artificial Sequence: Synthetic probe
aggtgtgacatgggatgtgattaaactgc

SEQ ID NO: 2601 - DNA, 23 bp, Artificial Sequence
  Description of Artificial Sequence: Synthetic primer
ggtgtgaaccatgagaagtatga

SEQ ID NO: 2602 - DNA, 22 bp, Artificial Sequence
  Description of Artificial Sequence: Synthetic primer
gagtccttccacgataccaaag

SEQ ID NO: 2603 - DNA, 24 bp, Artificial Sequence
  Description of Artificial Sequence: Synthetic probe
agatcatcagcaatgcctcctgca

SEQ ID NO: 2604 - DNA, 24 bp, Artificial Sequence
  Description of Artificial Sequence: Synthetic oligonucleotide
gttttattctaggtccaggtaggt

SEQ ID NO: 2605 - DNA, 24 bp, Artificial Sequence
  Description of Artificial Sequence: Synthetic oligonucleotide
aataagtttttcagacttttttac

SEQ ID NO: 2606 - protein, 6 aa, Artificial Sequence
  Description of Artificial Sequence: Synthetic peptide
GFILGP

SEQ ID NO: 2607 - DNA, 24 bp, Artificial Sequence
  Description of Artificial Sequence: Synthetic oligonucleotide
ttatagatgagtaaatgtaagcct

SEQ ID NO: 2608 - DNA, 24 bp, Artificial Sequence
  Description of Artificial Sequence: Synthetic oligonucleotide
tgttgggaattggagcaggtaagg

SEQ ID NO: 2609 - protein, 6 aa, Artificial Sequence
  Description of Artificial Sequence: Synthetic peptide
LLGIGA

SEQ ID NO: 2610 - RNA, 22 nt, Artificial Sequence
  Description of Artificial Sequence: Synthetic oligonucleotide
aauguuagugcuuguugagggc

1. One or more antisense oligonucleotides complementary to a transposable element present in an intronic sequence within a genome.

2. The antisense oligonucleotide of claim 1, wherein the transposable element is a retrotransposon.

3. The antisense oligonucleotide of claim 1, wherein the retrotransposon is a long interspersed nuclear element-1 (LINE-1), an Arthrobacter luteus element (Alu), short interspersed nuclear element variable number tandem repeat Arthrobacter luteus element (SINE-VNTR-Alu) or (SVA), or an endogenous retrovirus (ERV).

4. The antisense oligonucleotide of claim 1, wherein the oligonucleotide comprises a modified backbone.

5. The antisense oligonucleotide of claim 4, wherein the modified backbone comprises a 2′methoxy ethyl modification or a 2′ O-methyl modification.

6. The antisense oligonucleotide of claim 1, wherein the antisense oligonucleotide binds a splice acceptor site present in the SVA or Alu sequence.

7. (canceled)

8. The antisense oligonucleotide of claim 1, wherein the antisense oligonucleotide comprises at least one modified sugar moiety.

9. The antisense oligonucleotide of claim 8, wherein the modified sugar moiety is a 2′-O-methyl group or a 2′-O-methoxyethyl group.

10. The antisense oligonucleotide of claim 1, wherein said nucleobase oligomer comprises at least one modified nucleobase.

11. (canceled)

12. The antisense oligonucleotide of claim 1, wherein said transposable element inserts into an intronic sequence that is upstream, downstream, or within a gene of interest.

13. A set of antisense oligonucleotides comprising 2 or more of the antisense oligonucleotides of claim 1.

14. (canceled)

15. A pharmaceutical composition comprising an effective amount of the antisense oligonucleotide of claim 1 in a pharmaceutically acceptable excipient.

16. A method for treating a subject having a genetic disorder associated with the insertion of a transposable element, the method comprising administering to the subject one or more antisense oligonucleotides of claim 1 or one or more antisense oligonucleotides that binds to the transposable element or to a sequence present in a flanking region.

17. (canceled)

18. The method of claim 17, wherein the oligonucleotide binds upstream or downstream of the transposable element.

19. The method of claim 16, wherein the transposable element is a retrotransposon.

20. The method of claim 16, wherein the retrotransposon is a long interspersed nuclear element-1 (LINE-1), an Arthrobacter luteus element (Alu), a short interspersed nuclear element variable number tandem repeat Arthrobacter luteus element (SINE-VNTR-Alu) or (SVA), or an endogenous retrovirus (ERV).

21-22. (canceled)

23. An isolated cell that is heterozygous for a mutation associated with a genetic defect, comprising a genetic mutation and a second allele comprising a retrotransposon insertion.

24. The cell of claim 23, wherein the retrotransposon is a long interspersed nuclear element-1 (LINE-1), an Arthrobacter luteus element (Alu), a short interspersed nuclear element variable number tandem repeat Arthrobacter luteus element (SINE-VNTR-Alu) or (SVA), or an endogenous retrovirus (ERV).

25. (canceled)

26. A method of identifying an agent that inhibits a splicing event caused by a retrotransposon insertion, the method comprising contacting the cell, and detecting a splice product that does not comprise a retransposon sequence or fragment thereof.

27. The method of claim 26, wherein the retrotransposon is a long interspersed nuclear elements-1 (LINE-1), an Arthrobacter luteus element (Alu), a short interspersed nuclear element variable number tandem repeat Arthrobacter luteus element (SINE-VNTR-Alu) or (SVA), or an endogenous retrovirus (ERV).
